(19) United States
(12) Patent Application Publication
(10) Pub. No.: US 2004/0241671 A1
(43) Pub. Date: Dec. 2, 2004

(54) Sequences involved in phenomena of tumour suppression, tumour reversion, apoptosis and/or virus resistance and their us as medicines

(76) Inventors: Adam Telerman, Paris (FR); Robert Amson, Paris (FR); Marius Tuijnder, Mechelen (BE); Laurent Susini, Montmorency (FR)

Correspondence Address: Pennie & Edmonds, 1667 K Street N W, Washington, DC, 20006, US

(21) Appl. No.: 10/466,894

(22) PCT Filed: Jan. 23, 2002
(86) PCT No.: PCT/FR02/00273

(51) Int. Cl. C12Q 1/68; C07H 21/04; C12P 21/02; C12P 19/34; C07K 14/525

(52) U.S. Cl. 435/6; 435/69.5; 435/320.1; 435/325; 530/351; 536/23.5

(57) ABSTRACT

This invention is directed to sequences that are involved in the molecular pathways of tumor suppression, tumor reversion, apoptosis and/or virus resistance. The use of the compounds having these sequences, or encoded by them, in treating cancer, neurodegenerative diseases or viral diseases, and screening methods for compounds having such therapeutic properties are also encompassed.

[0001] The present invention relates to the demonstration of genes involved in the molecular pathways of tumor suppression, tumor reversion, apoptosis and/or resistance to viruses.

[0002] The present invention was made possible by the isolation of cDNA corresponding to messenger RNAs expressed or suppressed during tumor suppression, tumor reversion and/or the process of apoptosis.

[0003] In order to isolate the genes activated or inhibited during tumor reversion, an overall combing of the gene expression in a malignant cell line (U937) and a derived cell line (US4) with suppression of the malignant phenotype has been carried out. Comparison of the genes expressed (RNA messengers expressed in the two cell types) has made it possible to demonstrate differentially expressed genes, i.e. genes expressed in one of the cells whereas they are not expressed in the other (the genes may be activated or inhibited).

[0004] It is readily deduced therefrom that these genes are at least involved in the cancerization process, in one case by their absence and, in the other case, by their presence.

[0005] For this differential study, the method used is the method described in 1992 by Liang and Pardee (Differential display of eukaryotic mRNA by means of a polymerase chain reaction).

[0006] In order to develop a model, the inventors have formed the following hypotheses: if it were possible to select, from a tumor which is sensitive to the cytopathic effect of the H-1 parvovirus, cells which were resistant, then this resistance might be due to a change in their malignant phenotype. It was possible to demonstrate this for US4 cells selected from U937 cancerous cells. Unlike the parental line U937, the US4 clones (and also the US3 clones which will not figure in the present invention) are resistant to the cytopathic effect of the H-1 parvovirus.

[0007] At the molecular level, it has been possible to observe that this suppression of the malignant phenotype goes together with an activation of expression of the p₂₁^{waf1} gene, independently of the expression of the p53 gene.

[0008] The approach to the problem according to the present invention has made it possible to isolate sequences directly linked to several precise functions. As a consequence, unlike the random sequencing of ESTs, the sequences are sequences whose function is known due to the fact that they are involved in the process of suppression of the malignant phenotype, of tumor reversion or of apoptosis and/or in resistance to viruses.

[0009] Tumor reversion differs from tumor suppression by the fact that it encompasses a broader domain than that of tumor suppressor genes. In other words, tumor reversion takes place through the implementation of metabolic and/or molecular pathways which are not limited to the metabolic molecular pathways in which tumor suppressor genes are involved.

[0010] Thus, the present invention relates in particular to novel sequences and also to the use of these sequences in diagnosis and for implementing methods for screening compounds to be tested. The invention also relates to methods for detecting and/or assaying the sequences of the invention or their expression product(s) in a biological sample.

[0011] The present invention relates first of all to an isolated nucleotide sequence comprising a nucleotide sequence chosen from the group comprising:

[0012] a) SEQ ID No. 1 to SEQ ID No. 2280,

[0013] b) a nucleotide sequence of at least 15 consecutive nucleotides of a sequence as defined in a),

[0014] c) a nucleotide sequence having a percentage identity of at least 80%, after optimal alignment, with a sequence defined in a) or b),

[0015] d) a nucleotide sequence which hybridizes, under high stringency conditions, with a sequence defined in a) or b), and

[0016] e) a complementary nucleotide sequence or the RNA sequence corresponding to a sequence as defined in a), b), c) or d).

[0017] The nucleotide sequence according to the invention defined in c) has a percentage identity of at least 80%, after optimal alignment, with a sequence as defined in a) or b) above, preferably of at least 90%, most preferably of at least 98%.

[0018] The terms “nucleotide sequence”, “nucleic acid”, “nucleic acid sequence”, “polynucleotide”, “oligo-nucleotide” or “polynucleotide sequence”, terms which will be used indifferently in the present description, are intended to denote a precise chain of nucleotides, which may or may not be modified, making it possible to define a fragment or a region of a nucleic acid, which may or may not comprise natural nucleotides, and possibly corresponding equally to a double-stranded DNA, a single-stranded DNA and transcription products of said DNAs. Thus, the nucleic acid sequences according to the invention also encompass PNAs (peptide nucleic acids), or the like.

[0019] The fragments of the nucleotide sequences of the invention comprise at least 15 consecutive nucleotides.

[0020] Preferentially, they comprise at least 20 consecutive nucleotides, and even more preferentially they comprise at least 30 consecutive nucleotides.

[0021] It should be understood that the present invention does not relate to the nucleotide sequences in their natural chromosomal environment, i.e. in the natural state. They are sequences which have been isolated and/or purified, i.e. they have been taken directly or indirectly, for example by copying, their environment having been at least partially modified. The nucleic acids obtained by chemical synthesis are also intended to be denoted.

[0022] For the purpose of the present invention, the term “percentage identity” between two nucleic acid or amino acid sequences is intended to denote a percentage of nucleotides of amino acid residues which are identical between the two sequences to be compared, obtained after best alignment, this percentage being purely statistical with the differences between the two sequences being distributed randomly and through their entire length. The term “best alignment” or “optimal alignment” is intended to denote the alignment for which the percentage identity determined as below is the highest. Sequence comparisons between two nucleic acid or amino acid sequences are traditionally carried out by comparing these sequences after having aligned them optimally, said comparison being carried out by segment or by “window of comparison” in order to identify and compare local regions of sequence similarity. The optimal alignment of the sequences for comparison can be carried out, besides manually, by means of the local homology algorithm of Smith and Waterman (1981), by means of the local homology algorithm of Neddleman and Wunsch (1970), by means of the similarity search method of Pearson and Lipman (1988), by means of computer software using these algorithms (GAP, BESTFIT, BLAST P, BLAST N, FASTA and TFASTA in the Wisconsin Genetics Software Package, Genetics Computer Group, 575 Science Dr., Madison, Wis.). In order to obtain the optimal alignment, the BLAST program is preferably used, with the BLOSUM 62 matrix. The PAM or PAM250 matrices can also be used.

[0023] The percentage identity between two nucleic acid or amino acid sequences is determined by comparing these two optimally aligned sequences, the nucleic acid or amino acid sequences to be compared possibly comprising additions or deletions with respect to the reference sequence for optimal alignment between these two sequences. The percentage identity is calculated by determining the number of identical positions for which the nucleotide or the amino acid residue is identical between the two sequences, dividing this number of identical positions by the total number of positions compared, and multiplying the result by 100 in order to obtain the percentage identity between these two sequences.

[0024] The expression “nucleic acid sequences having a percentage and identity of at least 80%, preferably of at least 90%, more preferably of at least 98%, after optimal alignment, with a reference sequence” is intended to denote the nucleic acid sequences exhibiting, compared to the reference nucleic acid sequence, certain modifications, such as in particular a deletion, a truncation, an extension, a chimeric fusion, and/or a substitution, in particular of the point type, and the nucleic acid sequence of which has at least 80%, preferably at least 90%, more preferably at least 98%, identity, after optimal alignment, with the reference nucleic acid sequence. Preferably, the specific or high stringency hybridization conditions will be such that they ensure at least 80%, preferably at least 90%, more preferably at least 98%, identity, after optimal alignment, between one of the two sequences and the sequence complementary to the other.

[0025] A hybridization under high stringency conditions means that the conditions of temperature and of ionic strength are chosen such that they allow the hybridization between two complementary nucleic acid fragments to be maintained. By way of illustration, high stringency conditions for the hybridization step for the purposes of defining the nucleotide sequences described above are advantageously as follows:

[0026] The DNA-DNA or DNA-RNA hybridization is carried out in two steps:

[0027] (1) prehybridization at 42° C. for 3 hours in phosphate buffer (20 mM, pH 7.5) containing 5×SSC (1×SSC corresponds to a solution of 0.15M NaCl +0.015M sodium citrate), 50% of formamide, 7% of sodium dodecyl sulfate (SDS), 10× Denhardt's, 5% of dextran sulfate and 1% of salmon sperm DNA; (2) hybridization per se for 20 hours at a temperature which depends on the length of the probe (i.e.: 42° C. for a probe >100 nucleotides in length) followed by two washes of 20 minutes at 20° C. in 2×SSC+2% SDS, and 1 wash of 20 minutes at 20° C. in 0.1×SSC+0.1% SDS. The final wash is carried out in 0.1×SSC+0.1% SDS for 30 minutes at 60° C. for a probe >100 nucleotides in length. The high stringency hybridization conditions described above for a polynucleotide of defined length can be adapted by those skilled in the art for longer or shorter oligonucleotides, according to the teaching of Sambrook et al., 1989.

[0028] Among the nucleotide sequences having a percentage identity of at least 80%, preferably of at least 90%, more preferably of at least 98%, after optimal alignment, with the sequences according to the invention, preference is also given to the nucleic acid sequences which are variants of the sequences of the invention, or of their fragments, i.e. all of the nucleic acid sequences corresponding to allelic variants, i.e. individual variations of the sequences of the invention.

[0029] The term “variant nucleotide sequence” is intended to denote any RNA or cDNA resulting from a mutation and/or variation of a splice site of the genomic DNA corresponding to the nucleotide sequences of the invention.

[0030] A subject of the present invention is also a polypeptide encoded by a nucleotide sequence in accordance with the invention.

[0031] For the purpose of the present invention, the term “polypeptide” is intended to denote equally proteins or peptides.

[0032] According to a particular embodiment, the polypeptides in accordance with the invention comprise a polypeptide chosen from:

[0033] a) a polypeptide encoded by a nucleotide sequence in accordance with the invention,

[0034] b) a polypeptide having at least 80% identity with a polypeptide as defined in a),

[0035] c) a fragment of at least 5 amino acids of a polypeptide as defined in a) or b),

[0036] d) a biologically active fragment of a polypeptide as defined in a)., b), or c), and

[0037] e) a modified polypeptide of a polypeptide defined in a), b), c) or d).

[0038] The evaluation of the percentage identity is understood to be after optimal alignment of the sequences concerned. The expression “polypeptide the amino acid sequence of which has a percentage identity of at least 80%, preferably of at least 90%, more preferably of at least 98%, after optimal alignment, with a reference sequence” is intended to denote the polypeptides exhibiting certain modifications compared to the reference polypeptide, such as in particular one or more deletion(s) or truncation(s), an extension, a chimeric fusion and/or one or more substitution(s).

[0039] Among the polypeptides the amino acid sequence of which has a percentage identity of at least 80%, preferably of at least 90%, and more preferably of at least 98%, after optimal alignment, with a reference sequence such as a polypeptide in accordance with the present invention, or with one of its fragments, preference is given to the variant polypeptides encoded by the variant nucleotide sequences as previously defined, in particular the polypeptides the amino acid sequence of which exhibits at least one mutation corresponding in particular to a truncation, deletion, substitution and/or addition of at least one residue compared to the polypeptide sequences of the invention or to one of their fragments.

[0040] The present invention also relates to a cloning and/or cellular expression vector, characterized in that it comprises a nucleotide sequence according to the invention or in that it encodes a polypeptide according to the invention. Such a vector can also contain the elements required for the expression and, optionally, the secretion of the polypeptide in a host cell. Such a host cell is also the subject of the present invention.

[0041] The vectors comprising promoter and/or regulatory sequences are also part of the present invention. Said vectors preferably comprise a promoter, translation initiation and termination signals, and also the appropriate regions for regulating transcription. It must be possible for them to be maintained stably in the cell, and they can also possess specific signals able to permit secretion of the translated protein.

[0042] These various control signals are chosen as a function of the cellular host used. To this effect, the nucleic acid sequences according to the invention can be inserted into vectors which replicate autonomously in the chosen host or vectors which integrate in the chosen host.

[0043] Among the systems which replicate autonomously, use is preferably to be made, depending on the host cell, of systems of the plasmid or viral type, the viral vectors possibly being in particular adenoviruses (5), retroviruses, lentiviruses, poxviruses or herpesviruses (5a). Those skilled in the art are aware of the technology which can be used for each of these systems.

[0044] Advantageously, the vectors in accordance with the invention comprise a sequence for tissue-specific targeting and/or expression.

[0045] When integration of the sequence into the chromosomes of the host cell is desired, use may be made, for example, of systems of the plasmid or viral type; such viruses are, for example, retroviruses (6) or AAVs (7).

[0046] Among the nonviral vectors, preference is given to naked polynucleotides such as the naked DNA or the naked RNA according to the technique developed by the company VICAL, bacterial artificial chromosomes (BACs), yeast artificial chromosomes (YACs) for expression in yeast, mouse artificial chromosomes (MACs) for expression in murine cells and, preferably, human artificial chromosomes (HACs) for expression in human cells.

[0047] Such vectors are prepared according to the methods commonly used by those skilled in the art, and the clones resulting therefrom can be introduced into a suitable host by standard methods, such as, for example, lipofection, electroporation, heat shock, transformation after chemical permeabilization of the membrane, or cell fusion.

[0048] The invention also comprises the host cells, in particular the eukaryotic and prokaryotic cells, transformed with the vectors according to the invention and also the transgenic animals, preferably the mammals, except humans, comprising one of said transformed cells according to the invention. These animals can be used as models, for studying the etiology of inflammatory and/or immune diseases, and in particular inflammatory diseases of the digestive tract, or for studying cancers.

[0049] Among the cells which can be used for the purposes of the present invention, mention may be made of bacterial cells (8), but also yeast cells (9), along with animal cells, in particular mammalian cell cultures (10), and in particular Chinese hamster ovary (CHO) cells. Mention may also be made of insect cells in which it is possible to use methods using, for example, baculoviruses (11). A preferred cellular host for expression of the proteins of the invention consists of COS cells.

[0050] Among the mammals according to the invention, animals such as rodents, in particular mice, rats or rabbits, expressing a polypeptide according to the invention, are preferred.

[0051] These transgenic animals are obtained, for example, by homologous recombination on embryonic stem cells, transfer of these stem cells to embryos, selection of the chimeras affected in the reproductive lines, and growth of said chimeras.

[0052] The transgenic animals according to the invention can thus overexpress the gene encoding the protein according to the invention, or their homologous gene, or express the gene into which a mutation is introduced. These transgenic animals, in particular mice, are obtained, for example, by transfection of a copy of this gene under the control of a strong ubiquitous promoter, or a promoter selective for a tissue type, or after viral transcription.

[0053] The cells of mammals according to the invention can be used in a method for producing a polypeptide according to the invention, as described below, and can also be used as an analytical model.

[0054] The cells or mammals transformed as described above can also be used as models in order to study the interactions between the polypeptides according to the invention, and the chemical or protein compounds involved directly or indirectly in the activities of the polypeptides according to the invention, in order to study the various mechanisms and interactions which come into play.

[0055] They can in particular be used to select products which interact with the polypeptides according to the invention, or their [lacuna], as a cofactor or as an inhibitor, in particular a competitive inhibitor, or which have an agonist or antagonist activity with respect to the activity of the polypeptides according to the invention. Preferably, said transformed cells or transgenic animals are used as a model, in particular for selecting products for combating pathological conditions associated with abnormal expression of this gene.

[0056] A subject of the present invention is also a monoclonal or polyclonal antibody, a fragment of this antibody or a chimeric antibody capable of specifically recognizing a polypeptide in accordance with the present invention.

[0057] The specific monoclonal antibodies can be obtained according to the conventional method of hybridoma culture well known to those skilled in the art.

[0058] The antibodies according to the invention are, for example, humanized antibodies, or Fab or F(ab′)² fragments. They may also be in [lacuna] of immunoconjugates or of antibodies which are labeled in order to obtain a detectable and/or quantifiable signal.

[0059] The antibodies in accordance with the invention, but also the immunoconjugates, are therefore capable of specifically recognizing a polypeptide according to the present invention.

[0060] The specific polyclonal antibodies can be obtained from the serum of an animal immunized against polypeptides of the invention, in particular produced by genetic recombination or by peptide synthesis, according to usual procedures.

[0061] The advantage of antibodies which specifically recognize the polypeptides, their variants or their immunogenic fragments, according to the invention, is in particular noted.

[0062] A subject of the invention is also the use of a nucleotide sequence in accordance with the present invention, as a probe or primer for detecting, identifying, assaying and/or amplifying nucleic acid sequences.

[0063] According to the invention, the nucleotide sequences which can be used as a probe or as a primer in methods for detecting, identifying, assaying and/or amplifying nucleic acid sequences are a minimum of 15 bases, preferably of 20 bases, or better still of 25 to 30 bases, in length.

[0064] The probes and primers according to the invention can be labeled directly or indirectly with a radioactive or nonradioactive compound by methods well known to those skilled in the art, in order to obtain a detectable and/or quantifiable signal.

[0065] The nucleic acid sequences according to the invention which are unlabeled can be used directly as a probe or primer.

[0066] The sequences are generally labeled in order to obtain sequences which can be used for many applications. The primers or the probes according to the invention are labeled with radioactive elements or with nonradioactive molecules.

[0067] Among the radioactive isotopes used, mention may be made of ³²P, ³³P, ³⁵S³H or ¹²⁵I. The nonradioactive entities are selected from ligands such as biotin, avidin, streptavidin or digoxigenin, haptens, dyes, and luminescent agents such as radioluminescent, chemiluminescent, bioluminescent, fluorescent or phosphorescent agents.

[0068] The nucleotide sequences according to the invention can thus be used as a primer and/or probe in methods using the PCR (polymerase chain reaction) technique (11a). This technique requires choosing pairs of oligonucleotide primers which frame the fragment which must be amplified. Reference may, for example, be made to the technique described in U.S. Pat. No. 4,683,202. The amplified fragments can be identified, for example after agarose or polyacrylamide gel electrophoresis, or after a chromatographic technique such as gel filtration or ion exchange chromatography, and then sequenced. The specificity of the amplification can be controlled using, as primers, the nucleotide sequences of the invention and, as matrices, plasmids containing these sequences or else the derived amplification products. The amplified nucleotide fragments can be used as reagents in hybridization reactions in order to demonstrate the presence, in a biological sample, of a target nucleic acid of sequence complementary to that of said amplified nucleotide fragments.

[0069] The invention is also directed toward the nucleic acids which can be obtained by amplification using primers according to the invention.

[0070] Other techniques for amplifying the target nucleic acid can advantageously be employed as an alternative to PCR (PCR-like), using a pair of primers of nucleotide sequences according to the invention. The term “PCR-like” is intended to denote all methods using direct or indirect reproductions of nucleic acid sequences, or else in which the labeling systems have been amplified; these techniques are of course known. In general, it involves amplification of the DNA with a polymerase; when the sample of origin is an RNA, it is advisable to perform a reverse transcription beforehand. A large number of methods for this amplification currently exist, such as, for example, the SDA (strand displacement amplification) technique (12), the TAS (transcription-based amplification system) technique described by (13), the 3SR (self-sustained sequence replication) technique described by (14), the NASBA (nucleic acid sequence based amplification) technique described by (15), the TMA (transcription mediated amplification) technique, the LCR (ligase chain reaction) technique described by (16), the RCR (repair chain reaction) technique described by (17), the CPR (cycling probe reaction) technique described by (18), and the Q-beta-replicase amplification technique described by (19). Some of these techniques have since been improved.

[0071] When the target polynucleotide to be detected is an mRNA, an enzyme of the reverse transcriptase type is advantageously used, prior to carrying out an amplification reaction using the primers according to the invention or to carrying out a method of detection using the probes of the invention, in order to obtain a cDNA from the mRNA contained in the biological sample. The cDNA obtained will then serve as a target for the primers or the probes used in the method of amplification or of detection according to the invention.

[0072] The probe hybridization technique can be carried out in various ways (20). The most general method consists in immobilizing the nucleic acid extracted from the cells of various tissues or from cells in culture, on a support (such as nitrocellulose, nylon or polystyrene) and in incubating, under well-defined conditions, the immobilized target nucleic acid with the probe. After hybridization, the excess probe is removed and the hybrid molecules formed are detected by the appropriate method (measurement of the radioactivity, of the fluorescence or of the enzyme activity associated with the probe).

[0073] According to another embodiment of the nucleic acid probes according to the invention, the latter can be used as capture probes. In this case, a probe, termed “capture probe” is immobilized on a support and is used to capture, by specific hybridization, the target nucleic acid obtained from the biological sample to be tested, and the target nucleic acid is then detected using a second probe, termed “detection probe”, which is labeled with a readily detectable element.

[0074] The nucleotide sequences according to the invention can, moreover, be of value when they are used as antisense nucleotides, i.e. nucleotides whose structure provides, by hybridization with the target sequence, inhibition of the expression of the corresponding product. They can also be used as sense nucleotides which, by interaction with proteins involved in regulating the expression of the corresponding product, will induce either an inhibition or an activation of this expression.

[0075] A subject of the invention is also the use of a nucleotide sequence according to the present invention, for producing or synthesizing a recombinant polypeptide.

[0076] The method for producing a polypeptide of the invention in recombinant form, which is itself included in the present invention, is characterized in that the transformed cells, in particular the cells or mammals of the present invention, are cultured under conditions which allow expression of a recombinant polypeptide encoded by a nucleotide sequence according to the invention, and said recombinant polypeptide is recovered.

[0077] The recombinant polypeptides, characterized in that they can be obtained using said method of production, are also part of the invention.

[0078] The recombinant polypeptides obtained as indicated above can be in both glycosylated and unglycosylated form, and may or may not have the natural tertiary structure.

[0079] The sequences of the recombinant polypeptides can also be modified in order to improve their solubility, in particular in aqueous solvents.

[0080] Such modifications are known to those skilled in the art, such as, for example, the deletion of hydrophobic domains or the substitution of hydrophobic amino acids with hydrophilic amino acids.

[0081] These polypeptides can be produced from the nucleic acid sequences defined above, according to the techniques for producing recombinant polypeptides known to those skilled in the art. In this case, the nucleic acid sequence used is placed under the control of signals which allow its expression in a cellular host.

[0082] An efficient system for producing a recombinant polypeptide needs to have a vector and a host cell according to the invention.

[0083] These cells can be obtained by introducing into host cells a nucleotide sequence inserted into a vector as defined above, and then culturing said cells under conditions which allow the replication and/or expression of the transfected nucleotide sequence.

[0084] The methods used for the purification of a recombinant polypeptide are known to those skilled in the art. The recombinant polypeptide can be purified from cell lysates and extracts, or from the culture medium supernatant, by methods used individually or in combination, such as fractionation, chromatography methods, immunoaffinity techniques using specific monoclonal or polyclonal antibodies, etc.

[0085] The polypeptides according to the present invention can also be obtained by chemical synthesis using one of the many known forms of peptide synthesis, for example the techniques using solid phases (21) or techniques using partial solid phases, by fragment condensation or by conventional synthesis in solution.

[0086] The polypeptides which are obtained by chemical synthesis and which can comprise corresponding unnatural amino acids are also included in the invention.

[0087] The subject of the present invention is also a DNA chip, characterized in that it contains at least one nucleotide sequence in accordance with the present invention.

[0088] Specifically, the nucleotide sequences according to the invention intended to be used as a probe or as a primer for detecting, identifying, assaying and/or amplifying nucleic acid sequences can be immobilized covalently or noncovalently on a support, this support being a DNA chip or a high density filter.

[0089] The term “DNA chip” or “high density filter” is intended to denote a support to which are attached DNA sequences, each one of them being able to be pinpointed by its geographical location. These chips or filters differ mainly by their size, the material of the support and, optionally, the number of sequences which are attached thereto.

[0090] In particular, an in situ synthesis can be carried out by photochemical addressing or by inkjet. Other techniques consist in carrying out an ex situ synthesis and attaching the probes to the support of the DNA chip by mechanical or electrical addressing or by ink-jet. These various methods are well known to those skilled in the art.

[0091] A subject of the invention is also a protein chip comprising a polypeptide or an antibody according to the invention.

[0092] Such a protein chip makes it possible to study the interactions between the polypeptides according to the invention and other proteins or chemical compounds, and can thus be of use for screening compounds which interact with the polypeptides according to the invention.

[0093] The protein chips according to the invention can also be used to detect the presence of antibodies directed against the polypeptides according to the invention in the serum of patients to be tested. A protein chip comprising an antibody according to the invention can also be used to detect, this time, the presence of polypeptides, in the serum of patients, which can be recognized by said antibody.

[0094] A subject of the present invention is also the use of the compound chosen from a nucleotide sequence, a polypeptide, a vector, a cell or an antibody according to the invention, for preparing a medicinal product.

[0095] The pathological conditions more specifically targeted are viral diseases and diseases which are characterized by the development of tumor cells or cellular degeneration, such as Alzheimer's disease or schizophrenia. Thus, the abovementioned medicinal product is intended for the prevention and/or treatment of these diseases. In particular, the disease targeted is cancer.

[0096] One of the advantages of the present invention is that it has demonstrated the involvement of a large number of nucleotide sequences in the phenomena of tumor suppression, tumor reversion, apoptosis and/or viral resistance. These sequences are therefore differentially expressed when one of these abovementioned processes is set in motion. Consequently, in the presence of a patient in whom the triggering of one of these processes is suspected, or for whom it is desired to verify the absence of such a triggering, it is of use to be able to determine, or even quantify, the expression of one or more sequence(s) in accordance with the invention using a biological sample from said patient. Optionally, the analysis of the expression of one or more of said sequences can be accompanied by a comparison with a reference level of expression corresponding to that of a healthy individual.

[0097] Consequently, the invention therefore also comprises a method for the diagnosis and/or for the prognostic evaluation of a viral disease or a disease characterized by the development of a tumor or cellular degeneration, comprising analysis of the expression of at least one sequence of the invention using a biological sample from a patient to be tested.

[0098] According to a preferred embodiment, said method comprises the following steps:

[0099] isolating the messenger RNA from a biological sample derived from a patient to be tested,

[0100] preparing the complementary cDNA from said messenger RNA,

[0101] optionally, amplifying a portion of complementary DNA corresponding to at least one sequence of the invention, and

[0102] detecting the complementary DNA possibly amplified.

[0103] In particular, the analysis of the expression of the sequence can be carried out using a DNA chip as described above.

[0104] Among the sequences of the present invention, some have the characteristic of being receptors expressed at the surface of the cells and, in order to understand the mechanism thereof in the context of the above-mentioned processes, it is advantageous to search for compounds capable of interacting with this receptor, i.e. of interacting with a polypeptide in accordance with the invention; it is also necessary to provide for the secreted protein. This also applies to the polypeptides in accordance with the invention corresponding to secreted proteins (at the surface or outside the cells), hormone-like proteins, etc. Consequently, a subject of the present invention is also a method for screening compounds capable of attaching to a peptide in accordance with the invention, comprising the following steps:

[0105] bringing a polypeptide or a cell according to the invention into contact with a candidate compound, and

[0106] detecting the formation of a complex between said candidate compound and said polypeptide or said cell.

[0107] A method for screening compounds can also be advantageous relative to compounds capable of interacting with a nucleotide sequence according to the invention, or even with the sequences required for the expression or the regulation of these sequences.

[0108] Specifically, the compounds are capable of interacting with said sequences, with the effect of reducing, inhibiting or, on the contrary, potentiating the expression of the sequences in question. Such a method comprises the following steps:

[0109] bringing a nucleotide sequence or a cell according to the invention into contact with a candidate compound, and

[0110] detecting the formation of a complex between said candidate compound and said nucleotide sequence or said cell.

[0111] For reasons mentioned above, it may therefore be advantageous to search for and/or to assay, in a biological sample or specimen from a patient to be tested, the presence of a nucleotide sequence according to the invention. Such a detection and/or assaying method comprises the following steps:

[0112] bringing a nucleotide sequence according to the invention, which is labeled, into contact with the biological sample to be tested, under the conditions required for the formation of a hybrid, and

[0113] detecting and/or assaying the hybrid possibly formed between said nucleotide sequence and the nucleic acid present in said biological sample.

[0114] This method may also comprise a step for amplifying the nucleic acid of said biological sample using primers chosen from the nucleotide sequences according to the invention.

[0115] In particular, this method can be carried out using the DNA chip described above.

[0116] Those skilled in the art are able to implement such a method and can in particular use a reagent kit comprising:

[0117] a) a nucleotide sequence according to the invention used as a probe,

[0118] b) the reagents required to carry out a hybridization reaction between said probe and the nucleic acid of the biological sample,

[0119] c) the reagents required to detect and/or assay the hybrid formed between said probe and the nucleic acid of the biological sample.

[0120] Such a kit may also contain positive or negative controls in order to ensure the quality of the results obtained.

[0121] Similarly, in the context of the present invention, it is also possible to envision detecting and/or assaying a polypeptide according to the invention, and this method therefore comprises the following steps:

[0122] bringing the biological sample into contact with a labeled antibody according to the invention, and

[0123] detecting and/or assaying the complex formed by said antibody of polypeptide present in said sample.

[0124] Advantageously, this method can be carried out using the protein chip as described above. Here again, those skilled in the art are able to carry out such a method, and can in particular use a reagent kit comprising:

[0125] a) a monoclonal or polyclonal antibody according to the invention;

[0126] b) optionally, reagents for constituting a medium suitable for the antigen/antibody reaction;

[0127] c) the reagents for detecting the antigen/antibody complex.

[0128] Finally, a subject of the present invention is also a computer-readable medium or a computer medium on which at least one nucleotide sequence as claimed in claim 1 and/or at least one polypeptide sequence as defined in claim 3 or 4 are recorded. In particular, this medium is chosen from the group comprising:

[0129] a) a disk,

[0130] b) a hard disk,

[0131] c) a random access memory (RAM),

[0132] d) a read-only memory (ROM),

[0133] e) a CD-ROM.

[0134] The invention is not limited to the present description, but, on the contrary, it encompasses all the variants and will be understood more clearly in light of the experimental data below.

### FIGURES

[0135] FIG. 1 represents a tumor growth curve for the groups U937 and US4 in SCID mice.

[0136] FIG. 2 represents a curve of body weight of the mice carrying a U937 or US4 tumor.

[0137] 1-Data Relating to the U937 and US4 Cells

[0138] As seen above, the present invention uses the parental cells U937 and the “derived” cells US4. In fact, US4 cells and US3 cells (which do not figure in the context of the present invention) share certain characteristics. The method for obtaining them and also their properties are reported below.

[0139] Selection and Characterization of US3 and US4 Cells

[0140] U937 cells were subjected to two series of limiting dilution until a single clonal population was obtained. These cells were infected with the H-1 parvovirus. The cytopathic effect of the virus creates massive cell death, sparing two resistant clones, namely US3 and US4, after three months of continuous culturing. The survival of the cells is defined as the relative number of viable cells in the culture infected with the H-1 virus compared to the untreated culture, as measured four days after reinfection. To measure the tumorigenicity, 107 U937, US3 or US4 cells were injected subcutaneously into scid/scid mice (4 or 5 weeks old). The tumorigenicity is expressed by the number of tumors developed by the mice during the two months following the injection.

[0141] The approach was as follows: from clonal populations of malignant cells, subclones with a suppressed tumorigenic phenotype were derived. This selection, done via the H-1 parvovirus, is produced by elimination of the tumor cells, which are preferentially killed, while at the same time sparing the normal cells. The selection of cells resistant to the cytopathic effect of the H-1 parvovirus outside of a sensitive tumor can produce cells which have a decreased malignant phenotype.

[0142] On this basis, a clonal population of U937 cells was isolated, these cells are sensitive to the cytopathic effect of the H-1 parvovirus and, as regards the US3 and US4 clones, they are resistant to the virus. The US3 and US4 clones have a strong suppressed tumorigenic phenotype while the parental U937 cells develop tumors in 80% of cases among the scid/scid mice having been infected with the parvovirus; the US3 cells form only one tumor and the US4 cells develop one tumor per 20 inoculations with 10⁷ cells. The results are given in the table below.

[0143] Resistance to the H-1 Parvovirus and Tumorigenicity of the U937, US3 and US4 Cells

| | Survival of cells after | Tumorigenicity in |
|---|---|---|
| Cell lines | infection with the H-1 virus | scid/scid mice |
| U937 | 0.4 | 16/20 |
| US3 | 96 | 0/10 |
| US4 | 89 | 1/20 |

[0144] 2-Materials and Methods

[0145] This involves comparing the growth of subcutaneous tumors in SCID mice, induced by subcutaneous injection of transfected U937 and US4 human leukemia cell lines.

[0146] A. Leukemia Cell Lines and Culturing Conditions

[0147] All the injected cells of the U937 (ATCC) and US4 cell lines were provided in the form of cell suspensions in flasks filled with RPMI-1640 culture medium supplemented with 2 mM L-glutamine, 10% fetal bovine serum and gentamycin.

[0148] The U937 cell line is a CD4+ human monocyte cell line derived from a patient with a diffuse histiocytic lymphoma (1).

[0149] The cells were counted in a hemocytometer and their viability was tested with 0.25% trypan blue dye exclusion. The viability was respectively 95.5% and 90.5% for the U937 cells and the US4 cells. The U937 and US4 cells were centrifuged and then resuspended in an RPMI medium, before being injected into SCID mice.

[0150] B. Animals

[0151] 10 female SCID mice in good health (CB17/IcrHsd), 31 weeks old and weighing between 20 and 25 g, were supplied by Harlan France (Gannat, France). The animals were observed for 7 days in specific premises belonging to the Applicant, which is the specific pathogen free (SPF) animal care unit, before they were treated. The animal care unit (INRA, Dijon, France) is authorized by the French Ministers for Agriculture and for Research (approval no. A21100). The animal experiments were carried out according to the European guidelines on ethics regarding animal experiments (2) and the United Kingdom guidelines for welfare of animals in experimental neoplasia (3).

[0152] B.1. Environment

[0153] The animals were kept in rooms under controlled conditions with temperature (24±1° C.), humidity (55±1%), light period (12 h light/12 h dark) and air renewal. The animals were kept under SPF conditions and the temperature and humidity of the room were continually monitored. The ventilation system was programmed to give 14 renewals of air per hour without recirculation. Fresh air coming from the outside passes through a series of filters before being diffused evenly into each room. A high pressure (2 mm) was maintained in the experimentation rooms in order to prevent contamination or diffusion of pathogens within a mouse colony. All the personnel working under the SPF conditions follow the specific guidelines in consideration of hygiene and clothing when they enter the animal-rearing area.

[0154] B.2. Animal-Rearing

[0155] The animals were housed in polycarbonate cages (UAR, Epinay sur Orge, France) which were equipped so as to provide them with food and water. The standard size of the cages used is 637 cm² for 10 mice according to the standard internal operating procedures. The animal litter is made up of sterile wood shavings (UAR), which are replaced twice a week.

[0156] B.3. Feed and Drink

[0157] The animal feed was purchased from Extralabo (Provins, France). The feed was supplied ad libitum and was placed on the metal cover at the top of the cage. The water was also provided ad libitum, from water bottles equipped with rubber taps. The water bottles were washed, sterilized and replaced once a week. The water supply was sterilized by filtration with an absolute filter of 0.2 μm.

[0158] B.4. Animal and Cage Identification

[0159] After random distribution, the animals were identified with two different numbers tattooed on both ears. Each cage was labeled with a specific code

[0160] C—Experimental Data and Treatments

[0161] C.1. Induction of Tumors in the SCID Mice

[0162] Before the injection of cells, the SCID mice were distributed randomly in two groups, in a proportion of 5 mice per group. 10⁷ US4 or UP37 tumor cells in 0.2 ml of RPMI medium were inoculated subcutaneously into SCID mice, at time 0, for each point of injection. Each animal was given four injections of tumor cells located in different-regions; one in each flank and one in each shoulder.

[0163] C.2. Tumor Collection

[0164] When the tumors reached a volume of 1 500 mm², the mice were killed and the tumors were collected, weighed, frozen in liquid nitrogen, stored at −80° C., and then specifically labeled.

[0165] C.3. Control of Mice

[0166] The isoflurane forene (Minerve, Bondouble, France) was used to anesthetize the animals before the injection of cells for the sacrifice. After the injection of tumor cells, the mice were observed for 5 hours. The viability, behavior and body weight of the mice and the growth of the subcutaneous tumor were recorded twice a week.

[0167] During the experiment, the animals were killed, under anesthesia with isoflurane, by cervical dislocation if one of the following signs appeared:

[0168] sign of suffering (cachexia, weakening, difficulty in moving or in eating),

[0169] tumor growth up to 10% of body weight,

[0170] tumor ulceration and persistent exposure,

[0171] position of the tumor interfering with movement and/or feeding,

[0172] 20% weight loss for three consecutive days.

[0173] An autopsy was carried out for each animal, in order to detect the presence of possible metastases or of morphological abnormalities.

[0174] D—Presentation of the Data

[0175] D.1. Survival Parameters

[0176] The calculation for the median and mean survival time was expressed as follows:

[0177] Mean survival time=S₁/(S₂−NT)

[0178] With: S1=the sum of the daily survivors from day 0 up to the end of the experiment (without the survivors “not taken into account”*)

[0179] S2=the number of animals at the start

[0180] NT=the number of animals “not taken into consideration”*

[0181] * “not taken into consideration”: these are animals with tumors smaller than the predetermined limit, considered to result from a deficient implantation of the tumor.

[0182] D.2. Tumor Inhibition System

[0183] The tumor size was measured twice a week with a pair of compasses and the tumor volume (in mm₃) is estimated according to the formula: (length×width²)/2 (4). The experiments were stopped when the tumor sizes in the mice reached 1 500 mm³.

[0184] After sacrifice, the tumors were excised and weighed.

[0185] The curve of tumor growth for the US4 and U937 groups was plotted using the mean of the tumor volumes.

[0186] The tumor doubling time for the US4 and U937 groups was defined as the amount of time required to reach a mean tumor volume of 200% during the growth period.

[0187] The specific growth period over one or two doubling times (TD) from cell injections is defined as follows:

[0188] specific growth period=(TD US4−TD U937)/TD U937

[0189] the growth period was calculated as the difference in median growth time of the US4 group and of the U937 group to reach the same tumor size.

[0190] D.3. Statistical Tests

[0191] All the statistical analyses were carried out with the StatView® software (Abacus concept, Berkeley, USA). The statistical analyses of the mean body weight changes, of the tumor doubling time and of the time to reach “V” were carried out using the Bonferroni/Dunn test. A value p<0.05 was considered to be significant. All the groups were compared with one another.

[0192] E—Results

[0193] The curves of tumor volumes and mean body weights are shown in FIGS. 1 and 2 respectively.

[0194] No significant loss of body weight of the SCID mice, based on the two groups, was observed between day 8 and day 19.

[0195] A significant difference is observed between the two groups of SCID mice, regarding the time to reach “V”, whereas no significant difference was observed for the change in mean body weight (day 19-day 8) and for the doubling time.

[0196] The autopsies performed did not show the presence of metastases or of suspicious node development. Tumor collection was carried out on the animals sacrificed after anesthesia and cervical dislocation. The tumors were immediately placed in tubes, frozen in liquid nitrogen and stored at −80° C. The excised tumors were ovoid in shape, had a moderate consistency and were pinkish in color. The interactions of the tumor with its environment (skin and muscle tissue) was limited and superficial.

[0197] F—Conclusions

[0198] The US4 cell line showed a significantly lower rate of taking hold compared to the U937 cell line in the SCID mice.

[0199] The delay in growth between the US4 and U937 tumors was 23.5 days and the doubling time was equivalent.

### REFERENCES

[0200] (1) Sundström C. et Nilsson K., Int. J. Cancer, 17, 565, 1976.

[0201] (2) Principe d'éthique de l'expérimentation animale [Principles of ethics for animal experimentation], EEC Directive No. 86/609 of Nov. 24, 1986, Decree No. 87/848 of Oct. 19, 1987, Order of Application of Apr. 19, 1988.

[0202] (3) United Kingdom co-coordinating committee on cancer research guidelines for welfare of animals in experimental neoplasia, Br. J. Cancer, 77: 1-10, 1998.

[0203] (4) Bissery M. C. et al., Bull. Cancer, 78: 587, 1991.

[0204] (5) Perricaudet et al. (1992). La Recherche 23: 471.

[0205] (5a) Epstein (1992) Médecine/Sciences, 8, 902.

[0206] (6) Temin, (1986) Retrovirus vectors for gene transfer. In Kucherlapati R., ed. Gene.

[0207] (7) Carter, (1993) Curr. Op. Biotechnology 3, 533.

[0208] (8) Olins and Lee (1993), Curr. Op. Biotechnology 4: 520.

[0209] (9) Buckholz, (1993), Curr. Op. Biotechnology 4, 538.

[0210] (10) Edwards and Aruffo (1993), Curr. Op. Biotechnology, 4, 558.

[0211] (11) Luckow (1993), Curr. Op. Biotechnology 4, 564.

[0212] (11a) Rolfs, A. et al. (1991), Berlin: Springer-Verlag.

[0213] (12) Walker (1992), Nucleic Acids Res. 20: 1691.

[0214] (13) Kwoh, et al. (1989), Proc. Natl. Acad. Sci. USA, 86, 1173.

[0215] (14) Guatelli et al. (1990), Proc. Natl. Acad. Sci. USA 87: 1874.

[0216] (15) Kievitis et al. (1991), J. Virol. Methods, 35, 273.

[0217] (16) Landegren et al. (1988) Science 241, 1077.

[0218] (17) Segev, (1992), Kessler C. Springer Verlag, Berlin, N.Y., 197-205.

[0219] (18) Duck et al. (1990), Biotechniques, 9, 142.

[0220] (19) Miele et al. (1983), J. Mol. Biol., 171, 281.

[0221] (20) Matthews et al. (1988), Anal. Biochem., 169, 1-25.

[0222] (21) Stewart and Yound (1984), solid phase peptide synthesis, Pierce Chem. Company, Rockford, 111, 2nd ed., (1984).

1. An isolated nucleotide sequence comprising a nucleotide sequence chosen from the group comprising:
a) SEQ. ID NO. 1 to SEQ. ID NO. 2280,
b) a nucleotide sequence of at least 15 consecutive nucleotides of a sequence as defined in a),
c) a nucleotide sequence having a percentage identity of al least 80%, after optimal alignment, with a sequence defined in a) or b),
d) a nucleotide sequence which hybridizes, under high stringency conditions, with a sequence defined in a) or b), and
e) a complementary nucleotide sequence or the RNA sequence corresponding to a sequence as defined in a), b), c) or d).

2-30. (Canceled)

The application's sequence listing, which the Patent Office published only in electronic form, follows.

SEQUENCE LISTING (2270 sequences)

SEQ ID NO: 1 - DNA, 74 bp, Homo Sapiens
  misc_feature 18, 20, 35, 40, 50, 61, 67, 71, 74: n = A,T,C or G
tttttttttttttggggnanacggggtttcgctgngttgnccggcctggnctccagctccnaaccgngatngan

SEQ ID NO: 2 - DNA, 50 bp, Homo Sapiens
  misc_feature 23, 26, 42, 46, 50: n = A,T,C or G
tttttttttttttgacgggcctnggnagccccccaggcaaangccngctn

SEQ ID NO: 3 - DNA, 51 bp, Homo Sapiens
  misc_feature 16, 18, 39, 43, 49, 51: n = A,T,C or G
tttttttttttttgancnagaaaggaaacagggcaaaanaccngaaaantn

SEQ ID NO: 4 - DNA, 58 bp, Homo Sapiens
  misc_feature 23, 26, 46, 50, 57, 58: n = A,T,C or G
tttttttttttttgacgggcctnggnagccccccaggcaaaggccngctngactctnn

SEQ ID NO: 5 - DNA, 55 bp, Homo Sapiens
  misc_feature 13, 23, 26, 38, 46, 50, 55: n = A,T,C or G
ttttttttttttngacgggcctnggnagccccccaggnaaaggccngctngactn

SEQ ID NO: 6 - DNA, 58 bp, Homo Sapiens
  misc_feature 13, 23, 26, 38, 46, 50, 57, 58: n = A,T,C or G
ttttttttttttngacgggcctnggnagccccccaggnaaaggccngctngactctnn

SEQ ID NO: 7 - DNA, 53 bp, Homo Sapiens
  misc_feature 34, 37, 47, 50, 53: n = A,T,C or G
aattccagcacactggcggccgctcgtgcatgcntcnagagggcccncancgn

SEQ ID NO: 8 - DNA, 89 bp, Homo Sapiens
  misc_feature 55, 56, 77, 82, 87, 89: n = A,T,C or G
aatttcagcacactggcggccgcatcgagcttgcatcaagcgggcccccagtcgnnccatagagcgtagggcatacnctgtntctcngn

SEQ ID NO: 9 - DNA, 36 bp, Homo Sapiens
  misc_feature 19, 27, 31, 36: n = A,T,C or G
ttttttttttttttggggnaaacgggntttngctgn

SEQ ID NO: 10 - DNA, 144 bp, Homo Sapiens
ttgatctaaccgctaacattactgcaggccacctactcatgcacctaattggaagcgccaccctagcaatatcaaccattaaccttccctctacacttatcatcttcacaattctaaattctacttcctgtccaaaaaaaaaaa

SEQ ID NO: 11 - DNA, 53 bp, Homo Sapiens
  misc_feature 25, 34, 47, 51, 53: n = A,T,C or G
tttttttttttttggggatttgagncaggaaggnaacatggctaagngccngn

SEQ ID NO: 12 - DNA, 59 bp, Homo Sapiens
  misc_feature 25, 34, 42, 51, 53, 59: n = A,T,C or G
tttttttttttttggggatttgagncaggaaggnaacatggntaagggccngnaaactn

SEQ ID NO: 13 - DNA, 41 bp, Homo Sapiens
ttgatctaaccggcagaaggagtacaaatgcggggacctgg

SEQ ID NO: 14 - DNA, 54 bp, Homo Sapiens
ttgatctaaccggcagaaggagtacaaatgcggggacctggtgttcgccaaaga

SEQ ID NO: 15 - DNA, 34 bp, Homo Sapiens
  misc_feature 17, 25, 29, 34: n = A,T,C or G
tttttttttttttgggnatttgagncagnaaggn

SEQ ID NO: 16 - DNA, 53 bp, Homo Sapiens; identical to SEQ ID NO: 11
  misc_feature 25, 34, 47, 51, 53: n = A,T,C or G

SEQ ID NO: 17 - DNA, 53 bp, Homo Sapiens
  misc_feature 37, 40, 47, 50, 53: n = A,T,C or G
aattccagcacactggcggccgctcgtgcatgcttcnagngggcccncancgn

SEQ ID NO: 18 - DNA, 138 bp, Homo Sapiens
ttgatcatagcgtgtggcttgagggttaacctggagagcaggccggtttcccagtgaatggctctagtcatgtaatttgtttctaagtgtgcagtcctcacaaagcagctgtggctatcctcttcccaaaaaaaaaaa

SEQ ID NO: 19 - DNA, 143 bp, Homo Sapiens
  misc_feature 55, 65, 75, 91, 94, 102, 110, 125, 127, 136: n = A,T,C or G
tttttttttttttggccccttatcccaactaaacacatcaccactgaggacctgnccaggggttnagctcctgangaagagacagagaaanggncagagaanggaagggngacgctccatccaanangactacagngctatga

SEQ ID NO: 20 - DNA, 70 bp, Homo Sapiens
  misc_feature 24, 25: n = A,T,C or G
atagggcgaattgggccctctagnntgcatgctcgagcggccgccactagtggatccgagctcggtacca

SEQ ID NO: 21 - DNA, 173 bp, Homo Sapiens
  misc_feature 109, 123, 134, 138, 158, 165, 172, 173: n = A,T,C or G
tttttttctttttggagatgactgaacagatgaaggcatcagatgccttcatcagctggtattttgccttagatcaagccgaattccagcacactggcggccgctcgtncaggctccgagcgngcccccaacgnccgntagagcgtcgtcatacctgnctccggncggcggnn

SEQ ID NO: 22 - DNA, 53 bp, Homo Sapiens
  misc_feature 37, 47, 50, 53: n = A,T,C or G
aattccagcacactggcggccgctcgtgcatgcttcnagagggcccncancgn

SEQ ID NO: 23 - DNA, 33 bp, Homo Sapiens
  misc_feature 24, 27, 33: n = A,T,C or G
tcagcacactggcggccgctcgtncangcttcn

SEQ ID NO: 24 - DNA, 141 bp, Homo Sapiens
ttgatcgcattggggtgtatgagcatgtgtgcatggcttggaataaaactaacctgtggataatctgagtccctggccaaggatattgctttggagtcaccgtagccagttagaggatggtttttaggtcaaaaaaaaaaa

SEQ ID NO: 25 - DNA, 25 bp, Homo Sapiens
ttgatcgcattgtcaaaaaaaaaaa

SEQ ID NO: 26 - DNA, 25 bp, Homo Sapiens
ttgatcgcattgtcaaaaaaaaaaa

SEQ ID NO: 27 - DNA, 107 bp, Homo Sapiens
ttgatcgcattggggctaaccggctggtcatgtttgaccctgactggaacccagccaatgatgaacaagccatggcccgggtctggcgagatggtcaaaaaaaaaaa

SEQ ID NO: 28 - DNA, 130 bp, Homo Sapiens
ttgatcgcattgtggctgaaggggtgtctgaggagtctctgaacagactgaaaggtgctgttagctttggatatggcctttttcacctttgcatatccatggtgcccccaaacctgctcaaaaaaaaaaa

SEQ ID NO: 29 - DNA, 25 bp, Homo Sapiens
ttgatcgcattgtcaaaaaaaaaaa

SEQ ID NO: 30 - DNA, 93 bp, Homo Sapiens
  misc_feature 30, 32, 44, 48, 56, 62, 67, 76, 89, 92, 93: n = A,T,C or G
ttaattccagcacactggcggccgctcgtncnggctccgagcgngccnccaacgtncgctgngagcntcgtcatanctgtcttccgtgncgnn

SEQ ID NO: 31 - DNA, 88 bp, Homo Sapiens
  misc_feature 33, 36, 49, 63, 71, 83, 85, 88: n = A,T,C or G
ttaattccagcacactggcggccgctcgtgcangcntcgagagggcccncaacgccctatagngcgtcgtnatacactgtctncnggn

SEQ ID NO: 32 - DNA, 53 bp, Homo Sapiens; identical to SEQ ID NO: 17
  misc_feature 37, 40, 47, 50, 53: n = A,T,C or G

SEQ ID NO: 33 - DNA, 96 bp, Homo Sapiens
  misc_feature 33, 42, 48, 56, 61, 85, 89, 95: n = A,T,C or G
cgaattccagcacactggcggccgctcgtgcangcttcgagngggccnccaacgtnctatngagcgtcgtcatacactgtcttcngtgncggcgnt

SEQ ID NO: 34 - DNA, 94 bp, Homo Sapiens
  misc_feature 39, 42, 51, 55, 93: n = A,T,C or G
cgaattccagcacactggcggccgctcgtgcatgcttcnagngggcccccntcgncctatagagcgtcgtcatacatgtcttctggccggcgnt

SEQ ID NO: 35 - DNA, 84 bp, Homo Sapiens
  misc_feature 39, 42, 58, 59, 76, 77, 84: n = A,T,C or G
ttaattccagcacactggcggccgctcgtgcatgcttcnagngggcccccaacgcccnntagagcgtcgtcatacnntgtcacn

SEQ ID NO: 36 - DNA, 37 bp, Homo Sapiens
  misc_feature 32, 33, 37: n = A,T,C or G
ttaattccagcacactggcggccgctcgtgcnngctn

SEQ ID NO: 37 - DNA, 83 bp, Homo Sapiens
  misc_feature 37, 47, 50, 59, 61, 69, 74, 82, 83: n = A,T,C or G
aattccagcacactggcggccgctcgtgcatgcttcnagagggcccncancgccctatngngcgtcgtnatacntgtcttcnn

SEQ ID NO: 38 - DNA, 53 bp, Homo Sapiens
  misc_feature 40, 47, 50, 53: n = A,T,C or G
aattccagcacactggcggccgctcgtgcatgcttcgagngggcccncancgn

SEQ ID NO: 39 - DNA, 54 bp, Homo Sapiens
  misc_feature 18, 28, 30, 39, 46, 49, 54: n = A,T,C or G
tttttttttttttgccanagggagggancnggaaaaacngctcttnggnttctn

SEQ ID NO: 40 - DNA, 122 bp, Homo Sapiens
  misc_feature 33, 36, 43, 48, 62, 77, 81, 87, 101, 108, 113, 119, 122: n = A,T,C or G
tttttttttttttgccaactttccctatttttnaanggaaganccagntaactatcccacanagaccagcaaaggangcanggattnaaaattaccgaganctcacanggcangaaggnaan

SEQ ID NO: 41 - DNA, 135 bp, Homo Sapiens
ttgttttcgcagtaggtagacccatttgggattccctcagaggaagcttgtgaagtttgaagataatgtactttctcaccaatagtatgaggctataaaattttcaccaagaaatgataggggcaaaaaaaaaaa

SEQ ID NO: 42 - DNA, 46 bp, Homo Sapiens
  misc_feature 23, 30, 39, 43, 46: n = A,T,C or G
tttttttttttttgccagagggngggaacnggaaaaacngctnttn

SEQ ID NO: 43 - DNA, 147 bp, Homo Sapiens
  misc_feature 140, 143, 147: n = A,T,C or G
ttgttttcgcagtaagaagttttgaggcctgccatatgtttaacaattataagaataaaagtggagaaagatgctagcttatcttcgtttcttcctttaatttagaaacataggggatctccttggcaaaaaaaaaaaangcntgan

SEQ ID NO: 44 - DNA, 54 bp, Homo Sapiens
  misc_feature 18, 39, 46, 49, 54: n = A,T,C or G
tttttttttttttgccanagggagggaacgggaaaaacngctcttnggnttctn

SEQ ID NO: 45 - DNA, 30 bp, Homo Sapiens
  misc_feature 13, 21, 28, 30: n = A,T,C or G
ttttttttttttngccagagngagcgancn

SEQ ID NO: 46 - DNA, 129 bp, Homo Sapiens
ttgttttcgcagttatgtagatctttatgtgaaagacaaattggatgaaactggggtggccctgaaagttattcatgagcttgcaaatgaaagatgggatgtttgtctcacattgagcaaaaaaaaaaa

SEQ ID NO: 47 - DNA, 191 bp, Homo Sapiens
  misc_feature 138, 182, 188, 191: n = A,T,C or G
ttgatcaagtccaggaaattacaatagctgttaaggaaaggaaataatggtacagatctttttctgtctatcaaaactatttgatccaagcaaaaaaaaaaactagaaagccacggaacctgccattagtattggggngtatttttaagattaaaggtacactgatgggcaaaaaaaaaaangtaaancan

SEQ ID NO: 48 - DNA, 185 bp, Homo Sapiens
  misc_feature 103, 120, 167, 169, 185: n = A,T,C or G
ttgatcaagtcccaaattcattgacttaggggagttcagtatttaatgaaaccctatggagaatttatccctttacaatgtgaatagtcatctcctaatttgnttcttgtgtctttatgnttttctataacctggattttttaaatcatattaaaattacagatgcnanaaaaaaaaagggggan

SEQ ID NO: 49 - DNA, 56 bp, Homo Sapiens
ttgatcaagtccaggaaattacaatagctgttaaggaaaggaaataatggtacaga

SEQ ID NO: 50 - DNA, 86 bp, Homo Sapiens
ttgatcaagtccctacttggtaaaatcagcctcgagaaaaaagattggctgtttgatatggttaccacttggtttggagcaaaaaa

SEQ ID NO: 51 - DNA, 214 bp, Homo Sapiens
  misc_feature 170, 195, 209, 212, 214: n = A,T,C or G
ttgatcaagtccaggaaattacaatagctgttaaggaaaggaaataatggtacagatctttttctgtctatcaaaactatttgatccaagtgaaaaaaaaaaactagaaagctacggaacctgccattagtattggggggtatttttaagattaaaggtacactgatggncaaaaaaaaaagttttttttttttngccccacttttcanaanan

SEQ ID NO: 52 - DNA, 211 bp, Homo Sapiens
  misc_feature 138, 207, 208, 211: n = A,T,C or G
ttgatcaagtccaggaaattacaatagctgttaaggaaaggaaataatggtacagatctttttctgtctatcaaaactatttgatccaagtgaagaaaaaaaaaactagaaagctacggaacctgccattagtattgnggtgtatttttaagattaaaggtaaactgatgggcaaaaaaaaaataaaacatggcaaaaaaaaaaaannccn

SEQ ID NO: 53 - DNA, 217 bp, Homo Sapiens
  misc_feature 120, 188, 213, 214, 217: n = A,T,C or G
ttgatcaagtccaggaaattacaatagctgttaaggaaaggaaataatggtacagatctttttctgtctatcaaaactatctgatccaagtgaaaaaaaagaaaaaactagaaagctacnggaacctgccattagtattgtggtgtatttttaagattaaaggtacactgatgggcaaaaaaaaaaangtaaaacatggcaaaaaaaaaaaannccn

SEQ ID NO: 54 - DNA, 47 bp, Homo Sapiens
ttctcggcctcctcactgtagtatttaccttcctgctcggtgtcaga

SEQ ID NO: 55 - DNA, 174 bp, Homo Sapiens
ttgatctgacactaaggaaatgctgaagcttttggacttcggcagtctgtccaaccttcaggtcactcagcctacagttgggatgaatttcaaaacgcctcggggacctgtttgaattttttctgtagtgctgtattattttcaataaatctgggacaacagcaaaaaaaaaaa

SEQ ID NO: 56 - DNA, 235 bp, Homo Sapiens
  misc_feature 226, 233, 235: n = A,T,C or G
ttgatctgacactaaggaaatgctgaagcttttggacttcggcagtctgtccaaccttcaggtcactcagcctacagttgggatgaatttcaaaacgcctcggggacctgtttgaattttttcttgttggcagctgccacctgtccggcgattctgtccagatctctttgtccctgaggtgtcagatcaagccgaattccagcgcactggcggcccgctcgtgccngctccgngn

SEQ ID NO: 57 - DNA, 227 bp, Homo Sapiens
  misc_feature 213, 215, 223, 226, 227: n = A,T,C or G
ttgatctgacaccgagcaggaaggtaaatactacagtgaggaggccgaggtggatctgcgggaccctggcagagactatgagttatacaagtacacctgccaggagctacagaggctgatggctgagatccaagacctgaagagcaggggtggcaaggatgtggcaaaaagaaaaaaagccgaatttcagcacactggcggccggtactactngnttcgagcnggnn

SEQ ID NO: 58 - DNA, 172 bp, Homo Sapiens
ttgatctgacactaaggaaatgctgaagcttttggacttcggcagtctgtccaaccttcaggtcactcagcctacagttgggatgaatttcaaaacgcctcggggacctgtttgaattttttctgtagtgctgtattattttcaataaatctgggacaacagcaaaaaaaaa

SEQ ID NO: 59 - DNA, 36 bp, Homo Sapiens
ttgatctgacaccgagcaggaaggtaaatactacag

SEQ ID NO: 60 - DNA, 53 bp, Homo Sapiens
  misc_feature 47, 50, 53: n = A,T,C or G
aattccagcacactggcggccgctcgtgcatgcttctagagggcccncancgn

SEQ ID NO: 61 - DNA, 120 bp, Homo Sapiens
ttgatctgacacacagtgacacagccagaattcagcaagcatttcctatgcacagggagatagcagtggattttggtttggaatcaagacgtgatcagagttccagcgtggcaaaaaaaa

SEQ ID NO: 62 - DNA, 125 bp, Homo Sapiens
ttgatctgacacatggggattacaatttgagatgagatgtgggtggggacacagagccaaatcacatcattcctcccctggcccttcccaaatctcatgtccttcttacattgcaaaaaaaaaaa

SEQ ID NO: 63 - DNA, 83 bp, Homo Sapiens
  misc_feature 22, 38, 44, 51, 54, 75, 78, 83: n = A,T,C or G
tttttttttttttgcagggggnggaagttttcacaggnccaggnaacggcncanaacagcagccaaaacgctggnccnggctn

SEQ ID NO: 64 - DNA, 72 bp, Homo Sapiens
ttgatctgacacctcagggacaaagagatctggacagaatcgccggacaggtggcagctgccaacaagaagc

SEQ ID NO: 65 - DNA, 30 bp, Homo Sapiens
  misc_feature 15, 18, 25, 29, 30: n = A,T,C or G
gactgtttatttggnatnggttatnaccnn

SEQ ID NO: 66 - DNA, 97 bp, Homo Sapiens
ttgatctgacaccgagcaggaaggtaaatactacagaggctgatggctgagatccaagacctgaagagcaggggtggcaaggatgtggcaaaaaaaa

SEQ ID NO: 67 - DNA, 100 bp, Homo Sapiens
ttgatctgacaccgagcaggaaggtaaatactacagaggctgatggctgagatccaagacctgaagagcaggggtggcaagaatgtggcaaaaaaaaaaa

SEQ ID NO: 68 - DNA, 52 bp, Homo Sapiens
  misc_feature 36, 49, 51, 52: n = A,T,C or G
ttaattccagcacactggcggccgctcgtgcatgcntctagagggcccncnn

SEQ ID NO: 69 - DNA, 139 bp, Homo Sapiens
ttgatctcagacactcagggaacaaaatggtcagccagagctggggaaacccagaactgacttcaaaggcagcttctggacaggtggtgggaggggacccttcccaagaggaaccaataaaccttctgtgcaaaaaaaa

SEQ ID NO: 70 - DNA, 139 bp, Homo Sapiens; identical to SEQ ID NO: 69

SEQ ID NO: 71 - DNA, 139 bp, Homo Sapiens
ttgatctcagacactcagggaacaaaatggtcagccagagctggggaaacccagaactgacttcaaagacagcttctggacaggtggtgggaggggacccttcccaagaggaaccaataaaccttctgtgcaaaaaaaa

SEQ ID NO: 72 - DNA, 227 bp, Homo Sapiens
ttgatctcagaccaaatcatcacgaatggaaactgtaagcaatgcaagcagcagcctcaaatccaagctctcctggaagaataaaggggaggcttgatagttctgaaatggatcacagtgaaaatgaagattacacaatgtcttcacctttgccggggaaaaaaagtgacaagagagacgactctgatcttgtaaggtctgaattggagaagcctagaggcaaaaaa

SEQ ID NO: 73 - DNA, 48 bp, Homo Sapiens
ttgatctcagaccttaataattcaattagcattgggcaaaaaaaaaaa

SEQ ID NO: 74 - DNA, 39 bp, Homo Sapiens
  misc_feature 13, 23, 31, 34, 39: n = A,T,C or G
ttttttttttttngccgaagggnattcaccnacngattn

SEQ ID NO: 75 - DNA, 39 bp, Homo Sapiens; identical to SEQ ID NO: 74
  misc_feature 13, 23, 31, 34, 39: n = A,T,C or G

SEQ ID NO: 76 - DNA, 21 bp, Homo Sapiens
ttgagcaagttgtggctatga

SEQ ID NO: 77 - DNA, 122 bp, Homo Sapiens
  misc_feature 30, 42, 48, 73, 78, 86, 98, 102, 110, 114, 120, 122: n = A,T,C or G
tttttttttttttgcagggaaggggaaaangcctacctaatngggganggaccaaaagcaagggccaaaaaancccanaaaaatcnaattagccgttnattnaaccaggnaaangcattnan

SEQ ID NO: 78 - DNA, 99 bp, Homo Sapiens
ttgatcaatcgctacaggaaagaatggttatatcccgagcaattatgtagcgcctgcagattccattcaggcagaagaatggtattttggcaaaaaaaa

SEQ ID NO: 79 - DNA, 102 bp, Homo Sapiens
ttgatcaatcgctacaggaaagaatggttatatcccgagcaattatgtagcgcctgcagattccattcaggcagaagaatggtattttggcaaaaaaaaaaa

SEQ ID NO: 80 - DNA, 102 bp, Homo Sapiens; identical to SEQ ID NO: 79

SEQ ID NO: 81 - DNA, 52 bp, Homo Sapiens
  misc_feature 38, 47, 50, 52: n = A,T,C or G
tttttttttttttttttttttttgggggtaaaaaaaanccaaattcnaanan

SEQ ID NO: 82 - DNA, 197 bp, Homo Sapiens
  misc_feature 6, 138, 143, 148, 164, 166, 176, 192, 196, 197: n = A,T,C or G
ggcganttgggccctctagctgcatgctcgagcggccgccagtgtgatggatatctgcagaattcggcttatttgatgtacacaacattaaaagtactgacacctaaaaaaaaaaaaactaaaaaaaaaaagcccctntgatntcagnctaaaaaaaaaaaaancntaaaaaaaanccttaaaaaaaaaaangggnn

SEQ ID NO: 83 - DNA, 155 bp, Homo Sapiens
ttgatcatagcggaaagagtggaggcaggggagaccagttgataggttgttaacaataatctaggtaagaaataaccatcacttgagctaatacaatattagtacaggcagtgagaagtgatcagattctgaatatgttttgaaagttacaggat

SEQ ID NO: 84 - DNA, 89 bp, Homo Sapiens
  misc_feature 87: n = A,T,C or G
attgggccctctagagcatgctcgagcggccgccagtgtgatggatatctgcagaattcggccgaattccagcacactggcggccgntc

SEQ ID NO: 85 - DNA, 95 bp, Homo Sapiens
tttgccgtccatctggagctaaagtttacaatgcgagctcccactcgctgctctgtccagagctgcaggctagtcttgcctcccgtccgctatga

SEQ ID NO: 86 - DNA, 64 bp, Homo Sapiens
ttggaaccaatctaattacctcatacgctggcactttttttttttttttttttttttttttttt

SEQ ID NO: 87 - DNA, 62 bp, Homo Sapiens
ttggaaccaatcccctacaaatacccaagggatgagtacattctgccttttttttctttttt

SEQ ID NO: 88 - DNA, 102 bp, Homo Sapiens
  misc_feature 95, 101, 102: n = A,T,C or G
ttggaaccaatcccctacaaatacccaagggatgagtacattctgcctttctttttttttttttttttttttttttttttttttttttttttttncccccnn

SEQ ID NO: 89 - DNA, 62 bp, Homo Sapiens
ttggaaccaatctaattacctcatacgctggcactttttttttttttttttttttttttttt

SEQ ID NO: 90 - DNA, 45 bp, Homo Sapiens
ttggaaccaatctaattacctcatacgctggcacttttttttttt

SEQ ID NO: 91 - DNA, 44 bp, Homo Sapiens
ttggaaccaatctaattacctcatacgctggcactttttttttt

SEQ ID NO: 92 - DNA, 47 bp, Homo Sapiens
ttggaaccaatcaataaagagacttttcggttaaaaaaaaaaaaaaa

SEQ ID NO: 93 - DNA, 62 bp, Homo Sapiens
ttggaaccaatcaataaagagacttttcggttaaaaaaaaaaaaaaaaaaaaaaaaaaaaaa

SEQ ID NO: 94 - DNA, 23 bp, Homo Sapiens
tttacaacgagggaggatcactt

SEQ ID NO: 95 - DNA, 49 bp, Homo Sapiens
ttaactaaataaacaatatagcttttattttcagcacaaacataatcct

SEQ ID NO: 96 - DNA, 130 bp, Homo Sapiens
tttacaacgagggctatggtagagataagtactgcatcctatgggaacacatgaaaattcagagatgacttttcagggaaaccagagtatacccgagctagatgttaaaagttaagttgctatgagccag

SEQ ID NO: 97 - DNA, 144 bp, Homo Sapiens
tttacaacgagggctatggtagagataagtactgcatcctatgggaacacatgaaaattcagagatgacttttcagggaaaccagagtatacccgagctagatgttaaaagttaagttgctatgagccaggctaaaaaaaaaaa

SEQ ID NO: 98 - DNA, 132 bp, Homo Sapiens
tttacaacgagggctatggtagagataagtactgcatcctatgggaacacatgaaaattcagagatgacttttcagggaaaccagagtatacccgagctagatgttaaaagttaagttgctatgagccaggc

SEQ ID NO: 99 - DNA, 48 bp, Homo Sapiens
  misc_feature 42, 44, 48: n = A,T,C or G
ttaattccagcacactggcggccgctcgtgcatgcttcgagngngccn

SEQ ID NO: 100 - DNA, 48 bp, Homo Sapiens
  misc_feature 33, 42, 44, 48: n = A,T,C or G
ttaattccagcacactggcggccgctcgtgcangcttcgagngngccn

SEQ ID NO: 101 - DNA, 54 bp, Homo Sapiens
  misc_feature 42, 48, 53, 54: n = A,T,C or G
ttaattccagcacactggcggccgctcgtgcatgcttcgagngggccnccaann

SEQ ID NO: 102 - DNA, 42 bp, Homo Sapiens
  misc_feature 36, 39, 42: n = A,T,C or G
ttaattccagcacactggcggccgctcgtgcatgcntcnagn

SEQ ID NO: 103 - DNA, 48 bp, Homo Sapiens
  misc_feature 42, 44, 48: n = A,T,C or G
cgaattccagcacactggcggccgctcgtgcatgcttcgagngngccn

SEQ ID NO: 104 - DNA, 79 bp, Homo Sapiens
tttacaacgaggaataaaatttttttttttagcagactgggagacaccagagcccaaggccgcgttatctcctcctcgt

SEQ ID NO: 105 - DNA, 129 bp, Homo Sapiens
  misc_feature 2, 120, 124, 129: n = A,T,C or G
cnttgggccctctacatgcatgctcgagcggccgccagtgtgatggatatctgcagaattcggcttgttcagaaggcgatttccagcacactggcggccgctcgtactggctccgagcgngccnccttn

SEQ ID NO: 106 - DNA, 186 bp, Homo Sapiens
  misc_feature 20, 116, 123, 155, 171, 182, 183, 186: n = A,T,C or G
cgactgtgggccctctagcntgcatgctcgagcggccgccagtgtgatggatatctgcagaattcggcttagaagaaagtttagaaatgaaagaattccagcacactggcggccgntacgtantggatccgagctcggtaccaagcttggcgtantcatggtcatagctgnttcctggcccnngcn

SEQ ID NO: 107 - DNA, 129 bp, Homo Sapiens
tttacaacgaggtcatggttcatgttgtggagaatccagagtgtcccactggtccagacataattccaattgtagctggtgtggttgctggaattgttcttattggccttgcattactgctgatatgga

SEQ ID NO: 108 - DNA, 71 bp, Homo Sapiens
  misc_feature 20, 29, 41, 45, 54, 62, 65: n = A,T,C or G
tttttttttttttaggcaangaactaaanaaacaatatagntttnattttcagnacaaacanaancctcgt

SEQ ID NO: 109 - DNA, 151 bp, Homo Sapiens
tttacaacgaggactcaagaatgaaaaaagaagtaaatttttccgtggatcaaaacacttcttcagaaaataaaatagatttcaatgacttcataaaaagattgaaaacaggaaaatgtagtgcttttcctgatgtgcctaaaaaaaaaaa

SEQ ID NO: 110 - DNA, 62 bp, Homo Sapiens
  misc_feature 20, 41, 54, 56, 62: n = A,T,C or G
tttttttttttttaggcaangaactaaataaacaatatagnttttattttcagnanaaacan

SEQ ID NO: 111 - DNA, 112 bp, Homo Sapiens
  misc_feature 106, 109, 112: n = A,T,C or G
tttacaacgagggttaggaggtgggacgagagaagcaggttcgccactttaggttaccctcacccgcctaccccataccctcgttgtaaagccgaattccagccgnttnggn

SEQ ID NO: 112 - DNA, 39 bp, Homo Sapiens
tttacaacgagggctatggtagagataagtactgcatcc

SEQ ID NO: 113 - DNA, 129 bp, Homo Sapiens
tttacaacgaggcatccatcagggaaatcaaggactctctagcagaagttgaagagaaatataagaaggctatggtttccaatgctcagctagacaatgaaaagacaaacttcatgtaccaggttgata

SEQ ID NO: 114 - DNA, 72 bp, Homo Sapiens
tttacaacgaggattatgtttgtgctgaaaataaaagctatattgtttatttagttcattgtcatttgcatg

SEQ ID NO: 115 - DNA, 72 bp, Homo Sapiens
  misc_feature 21, 30, 56, 63, 66: n = A,T,C or G
ttttttttttttttaggcaangaactaaanaaacaatatagcttttattttcggcncaaacanaancctcgt

SEQ ID NO: 116 - DNA, 76 bp, Homo Sapiens
  misc_feature 20, 25, 31, 56, 61, 68, 71, 76: n = A,T,C or G
tttttttttttttaaggaanggganccaaanattaatttcttcatttcttgcattngaaanactcttnaangacan

SEQ ID NO: 117 - DNA, 73 bp, Homo Sapiens
tttacaacgagggtggatcacttgaggtcaggagtttgagaccagcctggccaacatggtaaaacaccatctg

SEQ ID NO: 118 - DNA, 91 bp, Homo Sapiens
ttgatctaaggccaaggatgtcattgaagagtatttcaaatgcaagaaatgaagaaataaatctttggctcacattccttaaaaaaaaaaa

SEQ ID NO: 119 - DNA, 33 bp, Homo Sapiens
ttagggacaggtggacttaatcctcctcctcgt

SEQ ID NO: 120 - DNA, 83 bp, Homo Sapiens
ttgatctaaggcacaatatttgtcactgttctattagactttttactgaagatgaataatggtgtaatggttaaaaaaaaaaa

SEQ ID NO: 121 - DNA, 62 bp, Homo Sapiens
ttttttaggcaatgaactaaataaacaatatagcttttattttcagcacaaacataatcctc

SEQ ID NO: 122 - DNA, 83 bp, Homo Sapiens
ttgatctaaggcacaatatttgtcactgttctattagactttttactgaaaatgaataatggtgtaatggttaaaaaaaaaaa

SEQ ID NO: 123 - DNA, 128 bp, Homo Sapiens
ttggggagtgggctggccgacaagagcaaggccccgtcccagccatccaacactctgtccttccctgccccaggatggacacccaacatgtggagaagttgctcttgaagctgctcactgggcctcgt

SEQ ID NO: 124 - DNA, 131 bp, Homo Sapiens
tttacaacgagggctatggtagagataagtactgcatcctatgggaacacatgaaaattcagagatgacttttcagggaaaccagagtatacccgagctagatgttaaaagttaagttgctatgagccagg

SEQ ID NO: 125 - DNA, 18 bp, Homo Sapiens
ttatcccctcggcctcgt

SEQ ID NO: 126 - DNA, 18 bp, Homo Sapiens
ttatcccctcggcctcgt

SEQ ID NO: 127 - DNA, 114 bp, Homo Sapiens
  misc_feature 59, 68, 74, 79, 88, 112, 113, 114: n = A,T,C or G
ttatcccctcggcctcgttgtaaagccgaattccagcacactggcggccgctcgtgcangcttcgagngggccnccaangttggcgtnatcatggtcatagctgtttcctgnnn

SEQ ID NO: 128 - DNA, 18 bp, Homo Sapiens
ttatcccctcggcctcgt

SEQ ID NO: 129 - DNA, 88 bp, Homo Sapiens
tttacaacgagggcaaagatgctaaatcttgctttgcattcagtaaagtgtcaagtgattaagtgtgtatttgtaccctaaaaaaaaa

SEQ ID NO: 130 - DNA, 88 bp, Homo Sapiens; identical to SEQ ID NO: 129

SEQ ID NO: 131 - DNA, 130 bp, Homo Sapiens
  misc_feature 6, 110, 121, 129: n = A,T,C or G
tgcganttgggccctctagctgcatgctcgagcggccgccagtgtgatggatatctgcagaattagtcagatcaagccgaattccagcacactggcggccgctcgtgcangcttcgagcgngcccccanc

SEQ ID NO: 132 - DNA, 42 bp, Homo Sapiens
  misc_feature 29, 36, 39, 42: n = A,T,C or G
ttaattccagcacactggcggccgctcgngcatgcntcnagn

SEQ ID NO: 133 - DNA, 135 bp, Homo Sapiens
tttggattggtcccaaaaggtgattaggaaagaaaaataatagtagttaagaatcttaagccaagaaatggattctttctagtatcttctctttaataatcagtactatgcctaaaaaaaaaaaaaaaaaaaaaa

SEQ ID NO: 134 - DNA, 56 bp, Homo Sapiens
tttggattggtcatggaaatagaatgcaccaccatgagcatcatcacctacaagct

SEQ ID NO: 135 - DNA, 110 bp, Homo Sapiens
ttatccaactctgcactagtcagagcacaagtgaagtaatgcattcaattctgggcctcaggactcttggcttatggccctaagggaatagcttgtatcagaccaatcca

SEQ ID NO: 136 - DNA, 52 bp, Homo Sapiens
  misc_feature 18, 22, 30, 35, 40, 47, 50, 52: n = A,T,C or G
tttttttttttttagcanacanggggtttnactgnattanccagganggncn

SEQ ID NO: 137 - DNA, 42 bp, Homo Sapiens
  misc_feature 33, 39, 42: n = A,T,C or G
ttaattccagcacactggcggccgctcgtgcangcttcnagn

SEQ ID NO: 138 - DNA, 25 bp, Homo Sapiens
tttcgatacaggctaaaaaaaaaaa

SEQ ID NO: 139 - DNA, 32 bp, Homo Sapiens
  misc_feature 27, 30, 32: n = A,T,C or G
ttaattccagcacactggcggccgctngtncn

SEQ ID NO: 140 - DNA, 61 bp, Homo Sapiens
agggcgatttgggccctctacatgcatgctcgagcggccgccagtgtgatggatatctgca

SEQ ID NO: 141 - DNA, 53 bp, Homo Sapiens
  misc_feature 33, 36, 48, 49, 53: n = A,T,C or G
ttaattccagcacactggcggccgctcgagcangcntctagagggccnncaan

SEQ ID NO: 142 - DNA, 35 bp, Homo Sapiens
  misc_feature 27, 31, 35: n = A,T,C or G
ttaattccagcacactggcggccgctngtantggn

SEQ ID NO: 143 - DNA, 60 bp, Homo Sapiens
  misc_feature 13, 30, 39, 41, 51, 54, 60: n = A,T,C or G
ttttttttttttnagaacgggataaagccnaattccagnanactggcggcngcncgggcn

SEQ ID NO: 144 - DNA, 126 bp, Homo Sapiens
  misc_feature 7, 16, 29, 109, 112, 122: n = A,T,C or G
aaccctngagggcgantgggccctctacngcatgctcgagcggccgccagtgtgatggatatctgcagaattcggcttaattccagcacactggcggccgctcgagcangcntcgagagggncacc

SEQ ID NO: 145 - DNA, 16 bp, Homo Sapiens
  misc_feature 7, 15, 16: n = A,T,C or G
ccactcngagggcgnn

SEQ ID NO: 146 - DNA, 42 bp, Homo Sapiens
  misc_feature 33, 37, 42: n = A,T,C or G
ttaattccagcacactggcggccgctcgtgcangctncgagn

SEQ ID NO: 147 - DNA, 40 bp, Homo Sapiens
  misc_feature 34, 37, 40: n = A,T,C or G
aattccagcacactggcggccgctcgtgcatgcntcnagn

SEQ ID NO: 148 - DNA, 48 bp, Homo Sapiens
  misc_feature 39, 42, 48: n = A,T,C or G
ttaattccagcacactggcggccgctcgtgcatgcttcnagngggccn

SEQ ID NO: 149 - DNA, 56 bp, Homo Sapiens
  misc_feature 29, 36, 48, 53, 56: n = A,T,C or G
ttaattccagcacactggcggccgctcgngcatgcntctagagggccnccaangtn

SEQ ID NO: 150 - DNA, 91 bp, Homo Sapiens
  misc_feature 29, 36, 39, 49, 52, 71, 83, 89, 91: n = A,T,C or G
ttaattccagcacactggcggccgctcgngcatgcntcnagagggcccncancgccctatagagcgtcgtnatacatgtcacnggccgncn

SEQ ID NO: 151 - DNA, 44 bp, Homo Sapiens
  misc_feature 30, 37, 43, 44: n = A,T,C or G
ttaattccagcacactggcggccgctcgtncaggctncgagcnn

SEQ ID NO: 152 - DNA, 42 bp, Homo Sapiens; identical to SEQ ID NO: 146
  misc_feature 33, 37, 42: n = A,T,C or G

SEQ ID NO: 153 - DNA, 44 bp, Homo Sapiens
  misc_feature 33, 37, 43, 44: n = A,T,C or G
ttaattccagcacactggcggccgctcgtgcangctncgagcnn

SEQ ID NO: 154 - DNA, 42 bp, Homo Sapiens; identical to SEQ ID NO: 102
  misc_feature 36, 39, 42: n = A,T,C or G

SEQ ID NO: 155 - DNA, 58 bp, Homo Sapiens
  misc_feature 52, 56, 58: n = A,T,C or G
ttaattccagcacactggcggccgctcgtgcatgcttctagagggcccacancgtncn

SEQ ID NO: 156 - DNA, 39 bp, Homo Sapiens
  misc_feature 12, 33, 37, 39: n = A,T,C or G
tttcctgacggntaaccaaaaggttaggggcgnggcncn

SEQ ID NO: 157 - DNA, 94 bp, Homo Sapiens
  misc_feature 75, 88, 92, 94: n = A,T,C or G
agcagcatgctcgagcggccgccagtgtgatggatatctgcagaattaattccagcacactggctggcagctcgngcatgcatctagngggncn

SEQ ID NO: 158 - DNA, 134 bp, Homo Sapiens
ggcgaattgggccctctagcatgcatgctcgagcggccgccagtgtgatggatatctgcagaattcggcttagatcatgtcagctcgtgtcagatcacaggatgggtgtcagatcagcaggtttttttttttag

SEQ ID NO: 159 - DNA, 151 bp, Homo Sapiens
  misc_feature 18, 132, 147, 148: n = A,T,C or G
gcgaattgggccctctanctgcatgctcgagcggccgccagtgtgatggatatctgcagaattcggcttatctgacaccaacgacagctgatctgacacggtgctaaaaaaaaaaaacctgctgatctgacnctaaaaaaaaaaaannggc

SEQ ID NO: 160 - DNA, 36 bp, Homo Sapiens
  misc_feature 36: n = A,T,C or G
tctgcagaattcggctcagcacactggcggcagctn

SEQ ID NO: 161 - DNA, 126 bp, Homo Sapiens
  misc_feature 8, 11: n = A,T,C or G
atagtgtnganttgggccctctagctgcatgctcgagcggccgccagtgtgatggatatctgcagaattcggcttaaaaaacagcggtgatcatagcggcaaaaaaaaaaaaaggaaaaaaaaaaa

SEQ ID NO: 162 - DNA, 93 bp, Homo Sapiens
  misc_feature 88, 91, 93: n = A,T,C or G
ctctagctgcatgctcgagcggccgccagtgtgatggatatctgcagaattaattccagcacactggcggccgctcgtgcatgcttcnagngn

SEQ ID NO: 163 - DNA, 39 bp, Homo Sapiens
  misc_feature 30, 33, 39: n = A,T,C or G
ttaattccagcacactggcggccgctcgtncangcttcn

SEQ ID NO: 164 - DNA, 131 bp, Homo Sapiens
  misc_feature 3, 6, 112, 123, 128: n = A,T,C or G
gtnganttgggccctctagatgcatgctcgagcggccgccagtgtgatggatatctgcagaattcggcttgctgatctaaggaattccagcacactggcggccgctcgtacnggctccgagcncgccncca

SEQ ID NO: 165 - DNA, 61 bp, Homo Sapiens
aggatttgggccctctacatgcatgctcgagcggccgccagtgtgatggatatctgcagaa

SEQ ID NO: 166 - DNA, 36 bp, Homo Sapiens
  misc_feature 7, 10, 30, 35, 36: n = A,T,C or G
ttaattncantacactgcacgtgcggtccnacagnn

SEQ ID NO: 167 - DNA, 49 bp, Homo Sapiens
  misc_feature 29, 36, 42, 48, 49: n = A,T,C or G
ttaattccagcacactggcggccgctcgngcatgcntctagngggccnn

SEQ ID NO: 168 - DNA, 75 bp, Homo Sapiens
  misc_feature 10, 19, 32: n = A,T,C or G
ggaaccctcngagggcganttgggccctctanatgcatgctcgagcggccgccagtgtgatggatatctgcagaa

SEQ ID NO: 169 - DNA, 62 bp, Homo Sapiens
  misc_feature 6, 20: n = A,T,C or G
ggcgtnttgggccctctacntgcatgctcgagcggccgccagtgtgatggatatctgcagaa

SEQ ID NO: 170 - DNA, 35 bp, Homo Sapiens
  misc_feature 27, 33, 35: n = A,T,C or G
ttaattccagcacactggcggccgctngtacangn

SEQ ID NO: 171 - DNA, 34 bp, Homo Sapiens
  misc_feature 31, 32, 34: n = A,T,C or G
ttaattccagcacactggcggccgctagacnngn

SEQ ID NO: 172 - DNA, 79 bp, Homo Sapiens
atcacgtactccaacaaaaagagagattatgctaacaccagtgactgtggcttatagtccaaagcgatcccctaaaaaa

SEQ ID NO: 173 - DNA, 46 bp, Homo Sapiens
ttatttcaaatgcagccacagaggcggtttctgcacaggtacgtga

SEQ ID NO: 174 - DNA, 44 bp, Homo Sapiens
  misc_feature 27, 32, 37, 43, 44: n = A,T,C or G
ttaattccagcacactggcggccgctngtacnggctncgagcnn

SEQ ID NO: 175 - DNA, 42 bp, Homo Sapiens
  misc_feature 33, 36, 42: n = A,T,C or G
tcagcacactggcggccgctcgtgcatgcttcnagngggccn

SEQ ID NO: 176 - DNA, 55 bp, Homo Sapiens
  misc_feature 29, 36, 39, 49, 51, 55: n = A,T,C or G
ttaattccagcacactggcggccgctcgngcatgcntcnagagggcccncnacgn

SEQ ID NO: 177 - DNA, 69 bp, Homo Sapiens
ttaaaatgttttgtaatccctcattttagaaatgtctaaagtcttaactatggagtaaatgtaccgtga

SEQ ID NO: 178 - DNA, 44 bp, Homo Sapiens
  misc_feature 37, 43, 44: n = A,T,C or G
ttaattccagcacactggcggccgctcgtacaggctncgagcnn

SEQ ID NO: 179 - DNA, 70 bp, Homo Sapiens
cctacagggcgattttgggccctctaactgcatgctcgagcggccgccagtgtgatggatatctgcagaa

SEQ ID NO: 180 - DNA, 110 bp, Homo Sapiens
  misc_feature 104, 107, 110: n = A,T,C or G
ggcgaattgggccctctagctgcatgctcgagcggccgccagtgtgatggatatctgcagaattaagccgaattccagcacactggcggccgctcgtgcatgcntcnagn

SEQ ID NO: 181 - DNA, 119 bp, Homo Sapiens
  misc_feature 111: n = A,T,C or G
gggcgaattgggccctctagctgcatgctcgagcggccgccagtgtgatggatatctgcagaattaagccgaattccagcacactggcggccgctcgtgcatgcttcgagngggccccc

SEQ ID NO: 182 - DNA, 33 bp, Homo Sapiens
  misc_feature 25, 27, 33: n = A,T,C or G
ttaattccagcacactggcggccgntngtacan

SEQ ID NO: 183 - DNA, 52 bp, Homo Sapiens
ttgatctcagacccaaacattaatcagttcttcaaatatctactcatcttcc

SEQ ID NO: 184 - DNA, 137 bp, Homo Sapiens
ttcaagaaggatataattcctacgccctctcagccgatgaacagttggaataggttgttagccggtaactaagattagtatggtaattaggaagatgagtagatatttgaagaactgattaatgtttgggtctgaga

SEQ ID NO: 185 - DNA, 50 bp, Homo Sapiens
ttgatctcagactgtgggacacggactcgcagaataaacatatatgtggc

SEQ ID NO: 186 - DNA, 218 bp, Homo Sapiens
  misc_feature 213, 214, 218: n = A,T,C or G
ctctagctgcatgctcgagcggccgccagtgtgatggatatctgcagaattcggcttcagaaagatatccaccaagacaatgaaagaaattacagaaatttctttaatgaatatagagttccatcaagcagaccaaagatgtctcccgcatgcgctcagtcctcatctccatcaagcagaagccgaattccagcacactggcggccgctcgtnntggn

SEQ ID NO: 187 - DNA, 86 bp, Homo Sapiens
  misc_feature 35, 42, 46, 84, 85, 86: n = A,T,C or G
aattccagcacactggcggccgctcgtgcatgctncgagcgngccnccaagcttggcgtaatcatggtcatagctgtttcctgnnn

SEQ ID NO: 188 - DNA, 35 bp, Homo Sapiens
  misc_feature 34: n = A,T,C or G
tctgcagaattaattccagcacactggcggcagnt

SEQ ID NO: 189 - DNA, 86 bp, Homo Sapiens
  misc_feature 30, 42, 46, 84, 85, 86: n = A,T,C or G
aattccagcacactggcggccgctcgtgcntgcttcgagcgngccnccaagcttggcgtaatcatggtcatagctgtttcctgnnn

SEQ ID NO: 190 - DNA, 35 bp, Homo Sapiens
  misc_feature 30, 31, 35: n = A,T,C or G
aattccagcacactggcggccgctcgtgcnngctn

SEQ ID NO: 191 - DNA, 68 bp, Homo Sapiens
  misc_feature 3, 13, 14, 26: n = A,T,C or G
ccntacagggcgnntgggccctctanagcatgctcgagcggccgccagtgtgatggatatctgcagaa

SEQ ID NO: 192 - DNA, 35 bp, Homo Sapiens; identical to SEQ ID NO: 170
  misc_feature 27, 33, 35: n = A,T,C or G

SEQ ID NO: 193 - DNA, 53 bp, Homo Sapiens
  misc_feature 35: n = A,T,C or G
ttaattccagcacactggcggccgctcgtacaggngccgagctagataccaac

SEQ ID NO: 194 - DNA, 48 bp, Homo Sapiens; identical to SEQ ID NO: 148
  misc_feature 39, 42, 48: n = A,T,C or G

SEQ ID NO: 195 - DNA, 82 bp, Homo Sapiens
  misc_feature 36, 42, 48, 53, 59: n = A,T,C or G
cgaattccagcacactggcggccgctcgtgcatgcntctagngggccnccaangttggngtaatcatggtcatagctgtttc

SEQ ID NO: 196 - DNA, 43 bp, Homo Sapiens
  misc_feature 37, 40, 43: n = A,T,C or G
ttaattccagcacactggcaggccgctcgtgcatgcntcnagn

SEQ ID NO: 197 - DNA, 28 bp, Homo Sapiens
  misc_feature 7, 8: n = A,T,C or G
agatatnnatcacactggcggccgctcc

SEQ ID NO: 198 - DNA, 197 bp, Homo Sapiens
  misc_feature 115, 120, 129, 131, 145, 149, 156, 163, 169, 182, 188, 196,197: n = A,T,C or G
ttgatcatggtcatagaaagtgaagattatggccaacagttagaaatcgtatgtctgattgacccgggctgcttccgagaaattgatgagctaaaaaaaaaaaaaaaaaaaaaanccaangaattgggnancattaggactcatntttntttaaanaaacagncctggnaggctagggcgancatggncgaaaagnn

SEQ ID NO: 199 - DNA, 76 bp, Homo Sapiens
  misc_feature 28, 33, 39, 43, 51, 56, 72, 74, 76: n = A,T,C or G
ttccctaaaaaaaaaaaaaaaacaacanccagnttactntggngtaggacngggtnctaaaaaaaaaaaaancncn

SEQ ID NO: 200 - DNA, 108 bp, Homo Sapiens
  misc_feature 7, 88, 97, 99, 107: n = A,T,C or G
ctctagntgcatgctcgagcggccgccagtgtgatggatatctgcagaattaagccgaattccagcacactggcggccgctcgtgcangcttcgagngngcccccanc

SEQ ID NO: 201 - DNA, 34 bp, Homo Sapiens
  misc_feature 13, 18, 27, 28, 34: n = A,T,C or G
ctgttttctgganggggnaaccgaagnncgttcn

SEQ ID NO: 202 - DNA, 120 bp, Homo Sapiens
  misc_feature 96, 109, 114, 119, 120: n = A,T,C or G
cgaattgggccctctagatgcatgctcgagcggccgccagtgtgatggatatctgcagaattaagccgaattccagcacactggcggccgctcgtncaggctccgagcncgccnccaann

SEQ ID NO: 203 - DNA, 34 bp, Homo Sapiens
  misc_feature 18, 26, 29, 34: n = A,T,C or G
tttttttttttttgacgngccttggnagnccccn

SEQ ID NO: 204 - DNA, 106 bp, Homo Sapiens
ttgatcaatcgcttgaaccggggaagcaggctatggtgtgccgagatcacgccattgcactccagcctgggcaacaagagccgaaactccgtctcaaaaaaaaaaa

SEQ ID NO: 205 - DNA, 106 bp, Homo Sapiens
ttgatcaatcgctggaacctaggaggcagaggttgcagtaagctgagattgtgccactgcactccagcctgggagacagagtgagactccctctcaaaaaaaaaaa

SEQ ID NO: 206 - DNA, 107 bp, Homo Sapiens
  misc_feature 83, 92: n = A,T,C or G
ttgatcaatcgctggaacctaggaggcagaggttgcagtaagctgagattgtgccactgcactccagcctgggagacagagtngagactccnctctcaaaaaaaaaa

SEQ ID NO: 207 - DNA, 105 bp, Homo Sapiens
ttgatcaatcgcttgaaccggggaagcaggctatggtgtgccgagatcacgccattgcactccagcctgggcaacaagagcgaaactccgtctcaaaaaaaaaaa

SEQ ID NO: 208 - DNA, 115 bp, Homo Sapiens
  misc_feature 110, 112, 115: n = A,T,C or G
ttgatcaatcgcttgaacccaggaggtggaagttgcagtgagccaagatcacgccactgcactccagcccggaggacagtgcgagactccctctcaaaaaaaaaaaaagncngan

SEQ ID NO: 209 - DNA, 103 bp, Homo Sapiens
ttgatcaatcgctggaacctaggaggcagaggttgcagtaagctgagattgtgccactgcactccagcctgggagacagagtgagactccctctcaaaaaaaa

SEQ ID NO: 210 - DNA, 106 bp, Homo Sapiens; identical to SEQ ID NO: 205

SEQ ID NO: 211 - DNA, 102 bp, Homo Sapiens
  misc_feature 64: n = A,T,C or G
ttgatcatagcgctaaaaaaaaaaaagtatatataatttcacctgaaacttgccctacaagagngggtataaatttttaaaaattaggcctaaaaaaaaaaa

SEQ ID NO: 212 - DNA, 109 bp, Homo Sapiens
  misc_feature 63, 103, 104, 109: n = A,T,C or G
ttgatcatagcgctaaaaaaaaaaaagtatatataatttcactgaaacttgccctacaagagngggtataaatttttaaaaattaggcctaaaaaaaaaaaannccgan

SEQ ID NO: 213 - DNA, 101 bp, Homo Sapiens
  misc_feature 15, 24, 99, 100, 101: n = A,T,C or G
ttttttttttttaanccaaccccnccccccttttttttttttttttttttttttttttttttttttttttttttttttttttttttttttttttttggnnn

SEQ ID NO: 214 - DNA, 49 bp, Homo Sapiens
  misc_feature 20, 45, 47, 49: n = A,T,C or G
tttttttttttttagcgaanataaaagaaaaagccattaaaaaancnan

SEQ ID NO: 215 - DNA, 190 bp, Homo Sapiens
ttgatctaaggcgtgggatcggttccagatgagaattcacaagcgactcattgacttgcacagtccttctgagattgttaagcagattacttccatcagtattgagccaggagttgaggtggaagtcaccattgcagatgcttaagtcaactattttaataaattgatgaccagttgttaaaaaaaaaaa

SEQ ID NO: 216 - DNA, 131 bp, Homo Sapiens
  misc_feature 77, 80, 107: n = A,T,C or G
ttgatcatagcgacagataactatacagctcaacaactagaaaaataaactgtttacctgcctaaaaaaaaaaaaanggngaaattataataaattagccgtcttgnggcccctaggcctaaaaaaaaaaa

SEQ ID NO: 217 - DNA, 111 bp, Homo Sapiens
  misc_feature 26, 56, 86, 92, 102, 109, 111: n = A,T,C or G
tttttttttttttaacacaaattganccattttaataaaaaagctagcccaaaaanggctctcattctataaagattaaatcattnccaaancacagggaanggaactngn

SEQ ID NO: 218 - DNA, 45 bp, Homo Sapiens
  misc_feature 44: n = A,T,C or G
ttgatcatagcgctaaaaaaaaaaaatgtgacaacggaggcagng

SEQ ID NO: 219 - DNA, 145 bp, Homo Sapiens
ttgatctaaggccctaccaccatgggaacagccactgggagataactagcagcttttaccatttgtcatttaattattttaaagttagaaactttttctttttgaatgtctgaaagagaatggcctgagaaatattttggaaaag

SEQ ID NO: 220 - DNA, 100 bp, Homo Sapiens
ttgatcatagcgctttgggaggctgaggcgggcggatcacttcaggtcaggagttcaaaaccggccaggccaattgtactaaaaaaaaaaaaaaaaaaaa

SEQ ID NO: 221 - DNA, 78 bp, Homo Sapiens
ttagccacatatatgtttattctgcgagtccgtgtcccacagtctgagactcttcttcccctccccttcccgctatga

SEQ ID NO: 222 - DNA, 51 bp, Homo Sapiens
ttgatcgcattggtattaaatcctcgtattcagtcttcctgcctaaaaaaa

SEQ ID NO: 223 - DNA, 16 bp, Homo Sapiens
ttgctaaaaaaaaaaa

SEQ ID NO: 224 - DNA, 81 bp, Homo Sapiens
atcacgtactccaacaaaaagagagattatgctaacaccagtgactgtggcttatagtccaaagcgatcccctaaaaaaaa

SEQ ID NO: 225 - DNA, 59 bp, Homo Sapiens
ttttttttttagggtatcaaaggcctttattgatttaattttcctttcaacttatcaat

SEQ ID NO: 226 - DNA, 15 bp, Homo Sapiens
tttttctcaatgcga

SEQ ID NO: 227 - DNA, 51 bp, Homo Sapiens
ttgatcgcattgatactataataagttcattcttaagcctaaaaaaaaaaa

SEQ ID NO: 228 - DNA, 50 bp, Homo Sapiens
ttgatcgcattgctatgttagaaggttatttatgtgctaaaaaaaaaaaa

SEQ ID NO: 229 - DNA, 125 bp, Homo Sapiens
  misc_feature 50, 64, 123, 124, 125: n = A,T,C or G
ttgatctaaggccctccccccccctttttttttttttttttaaaggggtnaaggtttttttaanttttttttttttttttttttttttttttttttttttttttttttttttttttaaaaaannn

SEQ ID NO: 230 - DNA, 65 bp, Homo Sapiens
  misc_feature 56, 63, 65: n = A,T,C or G
ttgatctaaggcgaagtgagagagctttagttgctttaaaaaaaaaaaaaaaaaantaaaaantn

SEQ ID NO: 231 - DNA, 109 bp, Homo Sapiens
  misc_feature 102, 105: n = A,T,C or G
gggcgaattgggccctctagctgcatgctcgagcggccgccagtgtgatggatatctgcagaattaattccagcacactggcggccgctcgtgcatgcttcnagngggc

SEQ ID NO: 232 - DNA, 121 bp, Homo Sapiens
  misc_feature 98, 105, 112, 116, 121: n = A,T,C or G
ggcgaattgggccctctagctgcatgctcgagcggccgccagtgtgatggatatctgcagaattcggccgaattccagcacactggcggccgctcgtncaggctncgagcgngccnccaan

SEQ ID NO: 233 - DNA, 157 bp, Homo Sapiens
  misc_feature 133, 147, 154: n = A,T,C or G
gtggcgaattgggccctctagctgcatgctcgagcggccgccagtgtgatggatatctgcagaattctgcagatatccatcacactggcggccgctcgagcatgcatctagagggcccaattcgccctatagngagtcgattacaantcactgnccg

SEQ ID NO: 234 - DNA, 107 bp, Homo Sapiens
  misc_feature 99, 105, 107: n = A,T,C or G
gggcgaattgggccctctagctgcatgctcgagcggccgccagtgtgatggatatctgcagaattaattccagcacactggcggccgctcgtgcatgcntcgagngn

SEQ ID NO: 235 - DNA, 65 bp, Homo Sapiens
ctctagatgcatgctcgagcggccgccagtgtgatggatatctgcagaattctgcagatatccac

SEQ ID NO: 236 - DNA, 99 bp, Homo Sapiens
  misc_feature 91: n = A,T,C or G
gggcgatttgggccctctactgcatgctcgagcggccgccagtgtgatggatatctgcagaattaagccgaattccagcacactggcggcngctcgtgc

SEQ ID NO: 237 - DNA, 48 bp, Homo Sapiens
  misc_feature 17, 23, 40: n = A,T,C or G
tttttttttttttaacnccatgnaaaagtatcaggggatncttttttt

SEQ ID NO: 238 - DNA, 83 bp, Homo Sapiens; identical to SEQ ID NO: 122

SEQ ID NO: 239 - DNA, 86 bp, Homo Sapiens
  misc_feature 20, 48, 54, 62, 75, 85: n = A,T,C or G
tttttttttttttaaccgancactacaatagcaacaaacctagagagncagttnaagacggnttctccctgaaangctgccttana

SEQ ID NO: 240 - DNA, 105 bp, Homo Sapiens
  misc_feature 5, 103, 105: n = A,T,C or G
cctanagggcgatttgggccctctactgcatgctcgagcggccgccagtgtgatggatatctgcagaattcggctagccgaattccagcacactggcggccgntn

SEQ ID NO: 241 - DNA, 44 bp, Homo Sapiens
  misc_feature 22, 43: n = A,T,C or G
tttttttttttttaaagcaacnaaagctctctcacttcgcctna

SEQ ID NO: 242 - DNA, 148 bp, Homo Sapiens
  misc_feature 62, 66, 74, 78, 125, 131, 140, 146: n = A,T,C or G
ttaaagcaactaaagctctctcactaagccgaattccagcacactggcggccgctcgtgcangctnccgagcgngccnccaagcgttggcgtaatcatggtcatagctgtttccctgctctctcnggcccncgcaccccncccccncc

SEQ ID NO: 243 - DNA, 15 bp, Homo Sapiens
ttaaagcaactaaag

SEQ ID NO: 244 - DNA, 33 bp, Homo Sapiens
  misc_feature 25, 30, 33: n = A,T,C or G
aattccagcacactggcggccgctngtacnggn

SEQ ID NO: 245 - DNA, 94 bp, Homo Sapiens
attgggccctctagctgcatgctcgagcggccgccagtgtgatggatatctgcagaattaagccgaattccagcacactggcggccgctcgtgc

SEQ ID NO: 246 - DNA, 46 bp, Homo Sapiens
  misc_feature 22: n = A,T,C or G
tttttttttttttaaagcaacnaaagctctctcacttcgccttaaa

SEQ ID NO: 247 - DNA, 53 bp, Homo Sapiens
  misc_feature 23, 30, 44, 48, 53: n = A,T,C or G
tttttttttttttttttaaaagnaacaaangctctctcacttcncctnaaatn

SEQ ID NO: 248 - DNA, 98 bp, Homo Sapiens
ttgatctaaggccaaggatgtcattgaagagtatttcaaatgcaagaaatgaagaaataaatctttggctcacattccttaaaaaaaaaaaaaaaaaa

SEQ ID NO: 249 - DNA, 55 bp, Homo Sapiens
  misc_feature 17, 19, 37, 47, 49, 55: n = A,T,C or G
tttttttttttttaagncnaattagttgttagcattnaaaaatcaananattcan

SEQ ID NO: 250 - DNA, 270 bp, Homo Sapiens
ttgatctaaggctgtatgaggcagggctgtaaactcaagagctcacagagaacaggcaagtaacaagtacaggcagcagctgagtggggactgaggtgtcccagagaaggcaggcctcgctagagggcacagtgcctctgagcactaactagctaattgcgtcccatataggaatgtgggccaagtgatgccagatcatcctttttcaagagaagccatgaatctcttgatttttaaatgctaacaactaattcgacttaaaaaaaaaaa

SEQ ID NO: 251 - DNA, 48 bp, Homo Sapiens
  misc_feature 22, 43, 45, 48: n = A,T,C or G
tttttttttttttaaagcaacnaaagctctctcacttcgcctnanatn

SEQ ID NO: 252 - DNA, 86 bp, Homo Sapiens
  misc_feature 20, 46, 48, 62, 85: n = A,T,C or G
tttttttttttttaaccgancactacaatagcaacaaacctagagngncagttcaagacggnttctccctgaaaggctgccttana

SEQ ID NO: 253 - DNA, 270 bp, Homo Sapiens; identical to SEQ ID NO: 250

SEQ ID NO: 254 - DNA, 88 bp, Homo Sapiens
  misc_feature 48, 62, 66, 75, 83, 85, 88: n = A,T,C or G
tttttttttttttaaccgaacactacaatagcaacaaacctagagagncagttcaagacggnttcnccctgaaangctgcctnanatn

SEQ ID NO: 255 - DNA, 71 bp, Homo Sapiens
tttacaacgagggcaaagatgctaaatcttgctttgcattcagtaaagtgtcaagtgattaaaaaaaaaaa

SEQ ID NO: 256 - DNA, 97 bp, Homo Sapiens
tttacaacgagggtttagaatatatttgttttacaaaattgttttctggttgcagaacttgaaaccctgctccctatagttgcattaaaaaaaaaaa

SEQ ID NO: 257 - DNA, 185 bp, Homo Sapiens
tttacaacgaggcaagcatagtgtagcactggtcttttctcactgtgcactgtttgaagttggcctcagtgctagaaatctgtattacctgagcaaatgtttaggaattctctttgcttttgaatacgttgaaagaaaggaattctttctccaatttgttcagctctcctcctagttaaaaaaaa

SEQ ID NO: 258 - DNA, 187 bp, Homo Sapiens
  misc_feature 37: n = A,T,C or G
tttacaacgaggcaagcatagtgtagcactggtcttntctcactgtgcactgtttgaagttggcctcagtgctagaaatctgtattacctgagcaaatgtttaggaattctctttgcttttgaatacgttgaaagaaaggaattctttctccaatttgttcagctctcctcctagttaaaaaaaaaa

SEQ ID NO: 259 - DNA, 184 bp, Homo Sapiens
tttacaacgaggcaagcatagtgtagcactggtcttttctcactgtgcactgtttgaagttggcctcagtgctagaaatctgtattacctgagcaaatgtttaggaattctctttgcttttgaatacgttgaaagaaaggaattctttctccaatttgttcagctctcctcctagttaaaaaaa

SEQ ID NO: 260 - DNA, 188 bp, Homo Sapiens
tttacaacgaggcaagcatagtgtagcactggtcttttctcactgtgcactgtttgaagttggcctcagtgctagaaatctgtattacctgagcaaatgtttaggaattctctttgcttttgaatacgttgaaagaaaggaattctttctccaatttgttcagctctcctcctagttaaaaaaaaaaa

SEQ ID NO: 261 - DNA, 47 bp, Homo Sapiens
  misc_feature 22, 33, 39, 43, 47: n = A,T,C or G
ttttttttttttttaactaggnggagagctgancaaatngganaaan

SEQ ID NO: 262 - DNA, 188 bp, Homo Sapiens
tttacaacgaggcaagcacagtgtagcactggtcttttctcactgtgcactgtttgaagttggcctcagtgctagaaatctgtattacctgagcaaatgtttaggaattctctttgcttttgaatacgttgaaagaaaggaattctttctccaatttgttcagctctcctcctagttaaaaaaaaaaa

SEQ ID NO: 263 - DNA, 104 bp, Homo Sapiens
  misc_feature 21, 42, 56, 65, 88, 96, 100, 104: n = A,T,C or G
tttttttttttttaactaggnggagagctgaacaaattgganaaagaattcctttntttcaacgnattcaaaagcaaagagaattccnaaacattngctnaggn

SEQ ID NO: 264 - DNA, 188 bp, Homo Sapiens; identical to SEQ ID NO: 260

SEQ ID NO: 265 - DNA, 96 bp, Homo Sapiens
ttatcaaggccctgggtgactgatcatctaaataacatttttgaggtgggatttttttctaattgagccaatgatctcctatctcctgtgcctcgt

SEQ ID NO: 266 - DNA, 25 bp, Homo Sapiens
tttacaacgaggttaaaaaaaaaaa

SEQ ID NO: 267 - DNA, 55 bp, Homo Sapiens
tttacaacgaggggaacagctaataggttgttgttgatttggttaaaaaaaaaaa

SEQ ID NO: 268 - DNA, 101 bp, Homo Sapiens
ttagctccatcaaggccctgggtgactgatcatctaaataacatttttgaggtgggatttttttttaattgagccaatgatctcctatctcctgtgcctcg

SEQ ID NO: 269 - DNA, 160 bp, Homo Sapiens
  misc_feature 158, 159, 160: n = A,T,C or G
tttacaacgaggctaagatagatgagagttgacaatgaaggttttcctaactatatatacctgtcacttgccaaagtaatgaaaaataaggattctctctttttttttttttttttttttttttttttttttttttttttttttttttaaaaaaaaannn

SEQ ID NO: 270 - DNA, 45 bp, Homo Sapiens
ttagataacttcctcgccattgcgccttcgtctccgcggcctcgt

SEQ ID NO: 271 - DNA, 41 bp, Homo Sapiens
tttacaacgaggctgcggagacgaaggcgcaatggcgagga

SEQ ID NO: 272 - DNA, 45 bp, Homo Sapiens; identical to SEQ ID NO: 270

SEQ ID NO: 273 - DNA, 48 bp, Homo Sapiens
ttaacagataacttcctcgccattgcgccttcgtctccgcggcctcgt

SEQ ID NO: 274 - DNA, 30 bp, Homo Sapiens
  misc_feature 20: n = A,T,C or G
tttacaacgaggccgcgganacgaaggcgc

SEQ ID NO: 275 - DNA, 51 bp, Homo Sapiens
  misc_feature 22, 37: n = A,T,C or G
tttttttttttttaaccaaatnaacaacaacctattnagctgttcccctcg

SEQ ID NO: 276 - DNA, 41 bp, Homo Sapiens
ataacttcctcgccattgcgccttcgtctccgcggcctcgt

SEQ ID NO: 277 - DNA, 44 bp, Homo Sapiens
ttgataacttcctcgccattgcgccttcgtctccgcggcctcgt

SEQ ID NO: 278 - DNA, 56 bp, Homo Sapiens
tttacaacgaggggaacagctaaataggttgttgttgatttggttaaaaaaagaaa

SEQ ID NO: 279 - DNA, 43 bp, Homo Sapiens
tttacaacgaggggtactgaagatgcactgttaaaaaaaaaaa

SEQ ID NO: 280 - DNA, 35 bp, Homo Sapiens
tttacaacgaggccgcggagacgaaggcgcaatgg

SEQ ID NO: 281 - DNA, 19 bp, Homo Sapiens
  misc_feature 15: n = A,T,C or G
cttcgtctccgcggnctcg

SEQ ID NO: 282 - DNA, 23 bp, Homo Sapiens
ttccatgtggaccaggttggcct

SEQ ID NO: 283 - DNA, 150 bp, Homo Sapiens
tttacaacgaggccaacctggtccacatgggttggcctcgttgtaaagccgaattctgcagatatccatcacactggctggccgctcgagcatgcatctagagggcccaattcgccctatagtgagtcgtattacaattcactggccgtc

SEQ ID NO: 284 - DNA, 22 bp, Homo Sapiens
tttacaacgaggttaaaaaaaa

SEQ ID NO: 285 - DNA, 22 bp, Homo Sapiens
tttacaacgaggttaaaaaaaa

SEQ ID NO: 286 - DNA, 25 bp, Homo Sapiens
tttacaacgaggttaaaaaaaaaaa

SEQ ID NO: 287 - DNA, 25 bp, Homo Sapiens
tttacaacgaggttaaaaaaaaaaa

SEQ ID NO: 288 - DNA, 22 bp, Homo Sapiens
tttacaacgaggttaaaaaaaa

SEQ ID NO: 289 - DNA, 25 bp, Homo Sapiens
tttacaacgaggttaaaaaaaaaaa

SEQ ID NO: 290 - DNA, 25 bp, Homo Sapiens
tttacaacgaggttaaaaaaaaaaa

SEQ ID NO: 291 - DNA, 25 bp, Homo Sapiens
tttacaacgaggttaaaaaaaaaaa

SEQ ID NO: 292 - DNA, 19 bp, Homo Sapiens
tttacaacgaggttaaaaa

SEQ ID NO: 293 - DNA, 25 bp, Homo Sapiens
tttacaacgaggttaaaaaaaaaaa

SEQ ID NO: 294 - DNA, 22 bp, Homo Sapiens
tttacaacgaggttaaaaaaaa

SEQ ID NO: 295 - DNA, 25 bp, Homo Sapiens
tttacaacgaggttaaaaaaaaaaa

SEQ ID NO: 296 - DNA, 77 bp, Homo Sapiens
  misc_feature 24, 29, 39, 68, 73, 77: n = A,T,C or G
tttttttttttttaacctcggaanaaaangactttattntaattaactcacaaagaataaaatcatancatancagn

SEQ ID NO: 297 - DNA, 274 bp, Homo Sapiens
  misc_feature 243, 261: n = A,T,C or G
tttggattggtctaatgaagaagttcaacctggagagatggaaaatcagctctcataactaagttaatttagtataaaaatagaattgatagtgagggtataaagtgtaaccatcagttaaacctctcctgtcattcctagcttccttgcttcagaattgaaatggaagtgggggtgtccctactctgtagaatctgggactgggcaaatgtttgtgtggcctccttaaactagctggtatgntatgattttattctttgngagttaattagaa

SEQ ID NO: 298 - DNA, 77 bp, Homo Sapiens; identical to SEQ ID NO: 296
  misc_feature 24, 29, 39, 68, 73, 77: n = A,T,C or G

SEQ ID NO: 299 - DNA, 308 bp, Homo Sapiens
  misc_feature 243, 261: n = A,T,C or G
tttggattggtctaatgaagaagttcaacctggagagatggaaaatcagctctcataactaagttaatttagtataaaaatagaattgatagtgagggtataaagtgtaaccatcagttaaacctctcctgtcattcctagcttccttgcttcagaattgaaatggaagtgggggtgtccctactctgcagaatctgggactgggcaaatgtttgtgtggcctccttaaactagctggtatgntatgattttattctttgngagttaattagaataaagtcattttcttccgaggttaaaaaaaaaaa

SEQ ID NO: 300 - DNA, 308 bp, Homo Sapiens
  misc_feature 261, 296: n = A,T,C or G
tttggattggtctaatgaagaagttcaacctggagagatggaagatcagctctcataactaagttaatttagtataaaaatagaattgatagtgagggtataaagtgtaaccatcagttaaacctctcctgtcattcctagcttccttgcttcagaattgaaatggaagtgggggtgtccctactctgtagaatctgggactgggcaaatgtttgtgtggcctccttaaactagctggtatggtatgattttattctttgngagttaattagaataaagtcattttcttccgaggntaaaaaaaaaaa

SEQ ID NO: 301 - DNA, 44 bp, Homo Sapiens
ttcagggccgccattgtacggatcgatcagtccagaccaatcca

SEQ ID NO: 302 - DNA, 141 bp, Homo Sapiens
tttggattggtctggtgtcagctgtgttttattgcacacctaaatcctgactataggcttttcatttctccgcaaagcctttattttgtctttcctgtctggccttgactttgttggtagagctgttacgtgtttagagac

SEQ ID NO: 303 - DNA, 133 bp, Homo Sapiens
ttcctgaacatttcctttctattaatcccaggtctttagacaaactcaaccaagagtaaacaagaaaatgtttaaattcacccaaagcctggaagccccttcttcgaattttcctgctttctcgaccaatcca

SEQ ID NO: 304 - DNA, 143 bp, Homo Sapiens
tttggattggtcgtacgggacgtgtaggaaaccttggcctggcaacctcattctttaacgtgaggaacataaatattactaaggatttgttggatcttcttgttgaagctaaacaagaagtgccgtcttggttaaaaaaaaaa

SEQ ID NO: 305 - DNA, 28 bp, Homo Sapiens
tttggattggtcacaggagttctgatag

SEQ ID NO: 306 - DNA, 125 bp, Homo Sapiens
tttggattggtcacaggagttctgatagtactgtttggtgcactcatgggaaattgaaccagtcgtagccacagtctttcagagcctgggctctggggagtggaagtgaaaaataaagatgtggc

SEQ ID NO: 307 - DNA, 144 bp, Homo Sapiens
tttggattggtcgtacgggacgtgtaggaaaccttggcctggcaacctcattctttaacgtgaggaacataaatattactaaggatttgttggatcttcttgttgaagctaaacaagaagtgccgtcttggttaaaaaaaaaaa

SEQ ID NO: 308 - DNA, 144 bp, Homo Sapiens
  misc_feature 20, 26, 30, 51, 62, 72, 81, 94, 97, 113, 124: n = A,T,C or G
tttttttttttttaaccaanacggcncttnttgtttagcttcaacaagaanatccaacaaanccttagaaanatttatgtncctcacgttaaanaangaggttgccaggccanggtttcctacncgtcccgtacgaccaatcca

SEQ ID NO: 309 - DNA, 90 bp, Homo Sapiens
tttggattggtcctagagaatatttgtttataactgtaaaggtaggaacatatgttctcatagcttctatgtatgtgttaaaaaaaaaaa

SEQ ID NO: 310 - DNA, 144 bp, Homo Sapiens
  misc_feature 20, 26, 30, 51, 53, 62, 81, 94, 97, 113, 132: n = A,T,C or G
tttttttttttttaaccaanacggcncttnttgtttagcttcaacaagaananccaacaaanccttagaaaaatttatgtncctctcgttaaanaangaggttgccaggccanggtttcctacacgtcccgnacgaccaatcca

SEQ ID NO: 311 - DNA, 142 bp, Homo Sapiens
tttggattggtcgtacgggacgtgtaggaaaccttggcctggcaacctcattctttaacgagaggagcataaattttactaaggatttgttggatcttcttgttgaagctaaacaagaagtgccgtcttggttaaaaaaaaa

SEQ ID NO: 312 - DNA, 106 bp, Homo Sapiens
  misc_feature 103, 105, 106: n = A,T,C or G
ttctttctacccatgagcatggaatgttcttccatttggttgtatcctcttttttttttttttttttttttttttttttttttttttttttaaaaaggggggncnn

SEQ ID NO: 313 - DNA, 172 bp, Homo Sapiens
ttaacgtagtgaaatatgtatgatacattactaagcaaaaacctgagttaataatggcaaagtgggttacaatttttgcttaaaaaggtctttatgtacaggtagatgtacaagataaattaaaatactggatggacagtcatcaaattgtgagttatatctgggtagaaag

SEQ ID NO: 314 - DNA, 72 bp, Homo Sapiens
ttctttctaccctggataatttgtcctgatctttcggattaaagatcatgttgttgatgttaaaaaaaaaaa

SEQ ID NO: 315 - DNA, 181 bp, Homo Sapiens
ttctttctacccagatataactcacaatttgatgactgtccatccagtattttaatttatcttgtacatctacctgtacataaagacctttttaagcaaaaattgcaacccactttgccattattaactcaggtttttgcttagtattgtatcatacatatttcactacgttaaaaaaaaa

SEQ ID NO: 316 - DNA, 104 bp, Homo Sapiens
  misc_feature 7, 83, 96, 99, 104: n = A,T,C or G
tgttgantggggccctctagcatgcatgctcgagcggccgccagtgtgatggatatctgcagaattcggcttttttttttttnaaccatgccttgnaanaaaan

SEQ ID NO: 317 - DNA, 123 bp, Homo Sapiens
ttttttggctccagttcggaggaggaggaggaagattacagatctattctgagtattttttagagagttaatatttatatttttagtaattttctggtagaaggaaattgcacaataaaatga

SEQ ID NO: 318 - DNA, 88 bp, Homo Sapiens
  misc_feature 32, 33, 44, 47, 86, 87, 88: n = A,T,C or G
ttaattccagcacactggcggccgctcgtgcnngcttcgagcgngcnaccaagcttggcgtaatcatggtcatagctgtttcctgnnn

SEQ ID NO: 319 - DNA, 31 bp, Homo Sapiens
ttttttggctccagttcgttaaaaaaaaaaa

SEQ ID NO: 320 - DNA, 23 bp, Homo Sapiens
ttcttatattctcttcgctatga

SEQ ID NO: 321 - DNA, 73 bp, Homo Sapiens
ttttttggctcccaacttaactagaggattttattcctaccacaggtctgtatcttttaaggtttgtttcttg

SEQ ID NO: 322 - DNA, 124 bp, Homo Sapiens
ttttttggctccagttcggaggaggaggaggaagattacagatctattctgagtattttttagagagttaatatttatatttttagtaattttctggtagaaggaaattgcacaataaaatgat

SEQ ID NO: 323 - DNA, 26 bp, Homo Sapiens
  misc_feature 21, 24, 26: n = A,T,C or G
tcagcacactggcggccgctngtncn

SEQ ID NO: 324 - DNA, 23 bp, Homo Sapiens
ttcttatattctcttcgctatga

SEQ ID NO: 325 - DNA, 85 bp, Homo Sapiens
ttctgtttattgactcttcgcagccagcggctcttcctctgcccctctgggatgcctaatccccgtctcccccctggagccaaaa

SEQ ID NO: 326 - DNA, 81 bp, Homo Sapiens
  misc_feature 73, 74, 81: n = A,T,C or G
ttggaaccaatcaataaagagacttttcggttaaaaaaaaaaaaaaaaaaaaaaaaaaaaaaaaaaggggggnngggcccn

SEQ ID NO: 327 - DNA, 74 bp, Homo Sapiens
  misc_feature 68, 69, 74: n = A,T,C or G
ttggaaccaatcaataaagagacttttcggttaaaaaaaaaaaaaaaaaaaaaaaaaaaaaagggggnnagggn

SEQ ID NO: 328 - DNA, 66 bp, Homo Sapiens
ttggaaccaatctctacaaagaaagcgtggatacccatcaacgaggttttgatattggaattcaga

SEQ ID NO: 329 - DNA, 127 bp, Homo Sapiens
tttcgatacaggtgctaaagttgaacgagctgatggatatgaaccaccagtccaagaatctgtttaaagttcagacttcaaatagtggcaaataaaaagtgctatttgtgatggttaaaaaaaaaaa

SEQ ID NO: 330 - DNA, 113 bp, Homo Sapiens
  misc_feature 10, 11: n = A,T,C or G
ttcatcacanntagcactttttatttgccactatttgaagtctgaactttaaacagattcttggactggtggttcatatccatcagctcgttcaactttagcacctgtatcga

SEQ ID NO: 331 - DNA, 127 bp, Homo Sapiens; identical to SEQ ID NO: 329

SEQ ID NO: 332 - DNA, 125 bp, Homo Sapiens
tttcgatacaggtgctaaagttgaacgagctgatggatatgaaccaccagtccaagaatctgtttaaagttcagacttcaaatagtggcaaataaaaagtgctatttgtgatggttaaaaaaaaa

SEQ ID NO: 333 - DNA, 54 bp, Homo Sapiens
  misc_feature 29, 48, 51, 54: n = A,T,C or G
tttttttttttttaaccttagggattctnactttattttgaagcctgnaanaan

SEQ ID NO: 334 - DNA, 125 bp, Homo Sapiens; identical to SEQ ID NO: 332

SEQ ID NO: 335 - DNA, 276 bp, Homo Sapiens
  misc_feature 268, 272, 276: n = A,T,C or G
atacaggcagccagagaagaaagggcatattaagttcaattaggctgacagctgagttgctaggtgtggctttctacttatttattctaggactcctagtttcttgactctgtgactggatgtctttgatcagtctggggagtttctcagatattatctgttcaaatattgctcctccccatttttttctcctttcccgggacttcaaactgctatatgtatgttagctctccctgtatcgaaattccagcacactgggcggccgctnctantggn

SEQ ID NO: 336 - DNA, 247 bp, Homo Sapiens
tttcgatacaggcagccagagaagaaagggcatattaagttcaattaggctgacagctgagttgctaggtgtggctttctacttatttattctaggactcctagtttcttgactctgtgactggatgtctttgatcagtctggggagtttctcagatattatctgttcaaatattgctcctccccatttttttctcctttcccgggacttcaaactgctatatgtatgttagctctccctgtatcga

SEQ ID NO: 337 - DNA, 165 bp, Homo Sapiens
  misc_feature 27, 31, 49, 53, 63, 75, 99, 106, 136, 147: n = A,T,C or G
tttttttttttttaacgagacatgaangganaagttttattggaaaaanggcnccaatagacnggctcaacgcanagttgccataaaccttccatttgnaaaaaangcattatttgcaaagggcaataaagcaaancgcaataagangacatatgcctgtatcga

SEQ ID NO: 338 - DNA, 169 bp, Homo Sapiens
tttggtaaagggtaagatgatagcccctacctctgagttatccttgagctactcagatttatggaagttaagatgcaacctctaactaggttcttaagattgtagtcttgggacagggtgcgggggaagcgtctgttgtctgtaaatcaacccaggttaaaaaaaaaaa

SEQ ID NO: 339 - DNA, 39 bp, Homo Sapiens
  misc_feature 20, 23, 35: n = A,T,C or G
tttttttttttttaaccttnggnaaaaaccatagnatgc

SEQ ID NO: 340 - DNA, 125 bp, Homo Sapiens
  misc_feature 18, 28, 32, 39, 74, 79, 101, 116, 120, 125: n = A,T,C or G
tttttttttttttaaccngggttgattnacanacaacanacgcttcccccgcaccctgtcccaagactacaatnttaanaacctagttagagttgcatctnaacttccataaatcngagnagctn

SEQ ID NO: 341 - DNA, 145 bp, Homo Sapiens
ttatttttaaatgtatgccattttaaaatgtgtagttagtaatgttaagtatattcatattgttgtgcagaagaacttcagaacttttcatcttgcaaaactgaaactatactcattaaacaactccctgtgtccacctgcccct

SEQ ID NO: 342 - DNA, 145 bp, Homo Sapiens
  misc_feature 145: n = A,T,C or G
tttggtaaagggtaagatgatagcccctacctctgagttatccttgagctactcagatttatggaagttaagatgcaactctaactaggttcttaagattgtagtcttgggacagggtgcgggggaagcgtctgttgtctgtaan

SEQ ID NO: 343 - DNA, 68 bp, Homo Sapiens
ttaatccaattgccaaaaggggctttctccctttctttttgccttttcagaagctatgccctttacca

SEQ ID NO: 344 - DNA, 147 bp, Homo Sapiens
  misc_feature 142, 146, 147: n = A,T,C or G
tttcggtcataggcagaattctaagatggccccatgatctctaccacctgctgttactactatgattatgttatccaacatttcaaaggttctttgaagatgtagttcaggttactaatcagttgggttaaaaaaaaaaaangccnn

SEQ ID NO: 345 - DNA, 139 bp, Homo Sapiens
tttcggtcataggcagaattctaagatggccccatgatctctaccacctgctgttactactatgattatgttatccaacatttcaaaggttctttgaagatgtagttcaggttactaatcagttgggttaaaaaaaaaa

SEQ ID NO: 346 - DNA, 89 bp, Homo Sapiens
  misc_feature 19, 30, 34, 40, 67: n = A,T,C or G
tttttttttttttaaccanaaagatatccnccanggcaangaaagaaattacagaaatttctttaangaatatagagttccatcaagca

SEQ ID NO: 347 - DNA, 35 bp, Homo Sapiens; identical to SEQ ID NO: 190
  misc_feature 30, 31, 35: n = A,T,C or G

SEQ ID NO: 348 - DNA, 33 bp, Homo Sapiens
  misc_feature 25, 29, 33: n = A,T,C or G
tttttttttttttaacccaacacangttnattn

SEQ ID NO: 349 - DNA, 103 bp, Homo Sapiens
ttctgcttgatggacttaatttactaatacctttgaaaagacttctgtgtatttattcaatgataagactgactttttttttttttttttttttttttttttt

SEQ ID NO: 350 - DNA, 103 bp, Homo Sapiens
ttctgcttgatgggaaatagaatatgtatatgtattctttgtctaccaactaccaaagaaacaaatactcctcagtttgacttgacttagtaaataaacttgt

SEQ ID NO: 351 - DNA, 117 bp, Homo Sapiens
ttctgcttgatgggaaatagaatatgtatatgtattctttgtctaccaactaccaaagaaacaaatactcctcagtttgacttgacttagtaaataaacttgtgttgggttaaaaaa

SEQ ID NO: 352 - DNA, 89 bp, Homo Sapiens
  misc_feature 15, 19, 30, 34, 40, 51, 67: n = A,T,C or G
tttttttttttttanccanaaagatatccnccanggcaangaaagaaattncagaaatttctttaangaatatagagttccatcaagca

SEQ ID NO: 353 - DNA, 46 bp, Homo Sapiens
  misc_feature 15, 18, 25, 41, 45, 46: n = A,T,C or G
tttttttttttttanccnaacacangtttatttactaagcnaagnn

SEQ ID NO: 354 - DNA, 117 bp, Homo Sapiens
ttctgcttgatgggaaatagaatatgtatatgtattctttgtctaccaactaccaaagaaacaaatactcctcggtttgacttgacttagtaaataaacttgtgttgggttaaaaaa

SEQ ID NO: 355 - DNA, 163 bp, Homo Sapiens
  misc_feature 7, 9, 124, 125, 144, 154, 159, 163: n = A,T,C or G
agtgttnanttgggccctctagcatgcatgctcgagcggccgccagtgtgatggatatctgcagaattaattccagcacactggcggccgttactagtggatccgagctcggtaccaagcttgnntgtaatcatggtcatagcntgtttcctgnttccntttn

SEQ ID NO: 356 - DNA, 170 bp, Homo Sapiens
  misc_feature 169: n = A,T,C or G
attgggccctctagcatgcatgctcgagcggccgccagtgtgatggatatctgcagaattcggctttacaacgaggcgacgatggtgctggtgtcctggattatgtggtacgtacctgtgggcatcatgttccttgttggaagcaagatcgtgaaaaaaaaaaaaaaanc

SEQ ID NO: 357 - DNA, 203 bp, Homo Sapiens
  misc_feature 186, 203: n = A,T,C or G
gggcgaattgggccctctagcatgcatgctcgagcggccgccagtgtgatggatatctgcagaattcggctttacaacgaggcgacgatggtgctggtgtcctggattatgtggtacgtacctgtgggcatcatgttccttgttggaagcaagatcgtgaaaaaaaaaaaaagccgaattccagcncacttgggcggccgttn

SEQ ID NO: 358 - DNA, 486 bp, Homo Sapiens
  misc_feature 413, 428, 435, 448, 457, 462: n = A,T,C or G
ctctagagcatgctcgagcggccgccagtgtgatggatatctgcagaattcggctttacaacgaggggcggagaccacttgggaccaaagcgaggacatggaatgggagagcgcagtggatgacatgaccaaaaagcaagtatttatttttgattctttggttaagaagtgtttgtttgaagtgctcagcacaaagaacatagctcctagtaatgttacttggttcgtgcagcatgaatggggaaaggaccaaggctggcactgtcatgtgctgattggaggcaaggactttagtcaacctcaaggaaaatggtggagaaggcagctaaatgtgtactggagtagatggttggtgactgcctgtaatgttcaactaacaccagctgaaaaaaaaaaaaagccgaattccagcncactggcggccgttnctagggnatccgagctcggncccaagctnggcgnaatcatggccatagctgttttcct

SEQ ID NO: 359 - DNA, 180 bp, Homo Sapiens
  misc_feature 177: n = A,T,C or G
ggcgaattgggccctctagcatgcatgctcgagcggccgccagtgtgatggatatctgcagaattcggctttacaacgaggcgacgatggtgctggtgtcctggattatgtggtacgtacctgtgggcatcatgttccttgttggaagcaagatcgtgaaaaaaaaaaaaagccganttc

SEQ ID NO: 360 - DNA, 257 bp, Homo Sapiens
  misc_feature 177, 185, 203, 207, 214, 223, 228, 251: n = A,T,C or G
gcgaattgggccctctagcatgcatgctcgagcggccgccagtgtgatggatatctgcagaattcggctttacaacgaggcgacgatggtgctggtgtcctggattatgtggtacgtacctgtgggcatcatgttccttgttggaagcaagatcgtgaaaaaaaaaaaaagccgganttccagcncacttggcgggccgttantagnggatccnagctcggcnccaancttggcgaaatcatggccatagntgtttc

SEQ ID NO: 361 - DNA, 113 bp, Homo Sapiens
  misc_feature 85, 91, 105, 111, 113: n = A,T,C or G
cgaattgggccctctagcatgcatgctcgagcggccgccagtgtgatggatatctgcagaattcggctttttttttttttaagcnggggtnagttgaacattacnggcagncn

SEQ ID NO: 362 - DNA, 222 bp, Homo Sapiens
  misc_feature 8, 194, 203, 214, 219, 222: n = A,T,C or G
agggcganttgggccctctacatgcatgctcgagcggccgccagtgtgatggatatctgcagaattcggctttacaacgaggcgacgatggtgctggtgtcctggattatgtggtaccgtacctgtgggcatcatgttccttgttggaagcaagatcgtgaaaaaaaaaaaaagccgaattccagcacactggnggccgttantaggggatccnagttnggn

SEQ ID NO: 363 - DNA, 93 bp, Homo Sapiens
  misc_feature 85, 87, 93: n = A,T,C or G
gggcgaattgggccctctagcatgcatgctcgagcggccgccagtgtgatggatatctgcagaattccagcacactggcggccgntnctacan

SEQ ID NO: 364 - DNA, 103 bp, Homo Sapiens
  misc_feature 86, 88, 98, 100, 103: n = A,T,C or G
agggcgaattgggccctctagaatgcatgctcgagcggccgccagtgtgatggatatctgcagaattccagcacactggcggccgntnctacaggctncnagn

SEQ ID NO: 365 - DNA, 225 bp, Homo Sapiens
  misc_feature 178, 186, 225: n = A,T,C or G
ggcgaattgggccctctagcatgcatgctcgagcggccgccagtgtgatggatatctgcagaattcggctttacaacgaggcgacgatggtgctggtgtcctggattatgtggtacgtacctgtgggcatcatgttccttgttggaagcaagatcgtgaaaaaaaaaaaaaagccganttccagcncacttgggcgggccgttactaggggatccgagctcggcn

SEQ ID NO: 366 - DNA, 104 bp, Homo Sapiens
  misc_feature 87, 97, 102, 104: n = A,T,C or G
agggcgaattgggccctctagatgcatgctcgagcggccgccagtgtgatggatatctgcagaattccagcacactggcggccgctngtacaggctncgagntn

SEQ ID NO: 367 - DNA, 473 bp, Homo Sapiens
  misc_feature 10, 431, 447, 467, 468, 473: n = A,T,C or G
atagggcganttgggccctctacatgcatgctcgagcggccgccagtgtgatggatatctgcagaattcggctttacaacgaggggcggagaccacttgggaccaaagcgaggacatggaatgggagagcgcagtggatgacatgaccaaaaagcaagtatttatttttgattctttggttaagaagtgtttgtttgaagtgctcagcacaaagaacatagctcctagtaatgttacttggttcgtgcagcatgaatggggaaaggaccaaggctggcactgtcatgtgctgattggaggcaaggactttagtcaacctcaaggaaaatggtggagaaggcagctaaatgtgtactggagtagatggttggtgactgcctgtaatgttcaactaacaccagctgaaaaaaaaaaaaagccgaattccagcncactgggcggccgttnctaggggatccgagctcggnnccaan

SEQ ID NO: 368 - DNA, 245 bp, Homo Sapiens
atagggcgaattgggccctctagatgcatgctcgagcggccgccagtgtgatggatatctgcagaattcggctgagaagcccggtcacgttgtccagctccacctgcagcttggtgaccttgtcggccagctctgtgcgcacgcgctctccctcgttgtaaagccgaattccagcacactgggcggccgttactagtggatccgagctcggtaccaagcttggcgtaatcatggtcatagctgtt

SEQ ID NO: 369 - DNA, 497 bp, Homo Sapiens
  misc_feature 448, 475: n = A,T,C or G
ggcgaattgggccctctagctgcatgctcgagcggccgccagtgtgatggatatctgcagaattcggctttacaacgaggggcggagaccacttgggaccaaagcgaggacatggaatgggagagcgcagtggatgacatgaccaaaaagcaagtatttatttttgattctttggttaagaagtgtttgtttgaagtgctcagcacaaagaacatagctcctagtaatgttacttggttcgtgcagcatgaatggggaaagaaccaaggctggcactgtcatgtgctgattggaggcaaggactttagtcaacctcaaggaaaatggtggagaaggcagctaaatgtgtactggagtagatggttggtgactgcctgtaatgttcaactaacaccagctgaaaaaaaaaaaaagccgaattccagcacactgggcggccgttactagnggatccgagctcggtaccaagcttggngaaatcatggccatagctgttt

SEQ ID NO: 370 - DNA, 464 bp, Homo Sapiens
  misc_feature 414, 435, 459, 462, 464: n = A,T,C or G
ctctagctgcatgctcgagcggccgccagtgtgatggatatctgcagaattcggctttacaacgaggggcggagaccacttgggaccaaagcgaggacatggaatgggagagcgcagtggatgacatgaccaaaaagcaagtatttatttttgattctttggttaagaagtgtttgtttgaagtgctcagcacaaagaacatagctcctagtaatgttacttggttcgtgcagcatgaatggggaaaggaccaaggctggcactgtcatgtgctgattggaggcaaggactttagtcaacctcaaggaaaatggtggagaaggcagctaaatgtgtactggagtagatggttggtgactgcctgtaatgttcaactaacaccagctgaaaaaaaaaaaaagccgaattccagcncactgggcggccgttactagnggatccgagctcggtaccaagctnggngn

SEQ ID NO: 371 - DNA, 181 bp, Homo Sapiens
  misc_feature 178: n = A,T,C or G
gggcgaattgggccctctagcatgcatgctcgagcggccgccagtgtgatggatatctgcagaattcggctttacaacgaggcgacgatggtgctggtgtcctggattatgtggtacgtacctgtgggcatcatgttccttgttggaagcaagatcgtgaaaaaaaaaaaaagccganttc

SEQ ID NO: 372 - DNA, 221 bp, Homo Sapiens
  misc_feature 7, 20, 155, 163, 180, 215: n = A,T,C or G
gggcganttgggccctctanatgcatgctcgagcggccgccagtgtgatggatatctgcagaattcggctttacaacgagggagagcgcgtgcgcacagagctggccgacaaggtcaccaagccgaattccagcacactggcggccgttacgtantggatccngagctcggtaccaagcnttggctgtaatcatggtcatagctgtttcctgacntttttc

SEQ ID NO: 373 - DNA, 228 bp, Homo Sapiens
  misc_feature 198, 204, 212, 219, 227, 228: n = A,T,C or G
attgggccctctagcatgcatgctcgagcggccgccagtgtgatggatatctgcagaattcggctttacaacgaggccaacacacaaaaacacagtaaaagtatggacaaattagtgggatccctgaaatctattccaactatgtgcttccaagtcacatgactcaataaatgcttcagctggtgaaaaaaaaaaaangccganttccagcncactggnggccgttnn

SEQ ID NO: 374 - DNA, 249 bp, Homo Sapiens
  misc_feature 179, 201, 216, 217, 230: n = A,T,C or G
gggcgaattgggccctctagatgcatgctcgagcggccgccagtgtgatggatatctgcagaatttacaacgaggcgacgatggtgctggtgtcctggattatgtggtacgtacctgtgggcatcatgttccttgttggaagcaagatcgtgaaaaaaaaaaaaagccgaattccagcncacttggcgggccgttactagnggatccgagctcggnnccaagcttggcgnaatcatggccatagctgtt

SEQ ID NO: 375 - DNA, 423 bp, Homo Sapiens
  misc_feature 422: n = A,T,C or G
tagggcgaattgggccctctagctgcatgctcgagcggccgccagtgtgatggatatctgcagaattcggctttacaacgaggggcggagaccacttgggaccaaagcgaggacatggaatgggagagcgcagtggatgacatgaccaaaaagcaagtatttatttttgattctttggttaagaagtgtttgtttgaagtgctcagcacaaagaacatagctcctagtaatgttacttggttcgtgcagcatgaatggggaaaggaccaaggctggcactgtcatgtgctgattggaggcaaggactttagtcaacctcaaggaaaatggtggagaaggcagctaaatgtgtactggagtagatggttggtgactgcctgtaatgttcaactaacaccagctgaaaaaaaaaaaaagccgant

SEQ ID NO: 376 - DNA, 514 bp, Homo Sapiens
  misc_feature 428, 436, 444, 452, 469, 473, 481, 486, 503, 512, 513, 514: n = A,T,C or G
tagggcgaattgggccctctagcatgcatgctcgagcggccgccagtgtgatggatatctgcagaattcggctttacaacgaggccaacacacaaaaacacagtaaaagtatggacaaattagtgggatccctgaaatctattccaactatgtgcttccaagtcacatgactcaataaatgcttcagctggttgagttgtgcttggcgttcactaccaggagagttctgattaataaaaactcattccatcaattaataatttagtagctctctttcaacctgagccaaattcaagcacaagctaaaggataagcagtgacccatggccaatttcctatgtcatacacttgccattagtgacgtaagttaagccattcttcaaaacattaaacagccttcaagaacatgaaaaaaaaaaaaagccganttccagcncactgggnggccgttnctaggggatccgagctnggtnccaagctnggggnaatcatggccatagtgntttccctgnnn

SEQ ID NO: 377 - DNA, 222 bp, Homo Sapiens
  misc_feature 201, 206, 213, 216, 222: n = A,T,C or G
ggcgaattgggccctctagatgcatgctcgagcggccgccagtgtgatggatatctgcagaattcggctttacaacgaggcgacgatggtgctggtgtcctggattatgtggtacgtacctgtgggcatcatgttccttgttggaagcaagatcgtgaaaaaaaaaaaaagccgaattccagcacacttgggcggccgttnctagnggatccnagntcggcn

SEQ ID NO: 378 - DNA, 497 bp, Homo Sapiens
  misc_feature 6, 170, 411, 419, 427, 442, 456, 467, 478, 489, 496, 497: n = A,T,C or G
ggcganttgggccctctagctgcatgctcgagcggccgccagtgtgatggatatctgcagaattcggctttacaacgaggagaagcactctcagcattggattcaaaggctaacaatttgtccagtctgtccaagaaataccgccaggatgcgaagtacttgaacatgcngttccacttatgccaaacttgcagcagtagctgtatttttcatcatgttaatagtgtatgtccgattctggtggctgtgaaataatgaatacagtcactggtaagggagaacctagaacccagtaggtgtatattttcaggaaactgagctcacagagatgtgtattagaatccaagtggaacttctgcctctaaagaccttgcaagaaaagagatgccctgaaaaaaaaaaaaagccganttccagcncactgggnggccgttactagggnatccgagctcggtnccaagcttggngaaatcatggncatactgtttnccctggnn

SEQ ID NO: 379 - DNA, 217 bp, Homo Sapiens
  misc_feature 176, 200, 205, 212, 215, 217: n = A,T,C or G
ggcgaattgggccctctagcagcatgctcgagcggccgccagtgtgatggatatctgcagaattcggctttacaacgaggcgacgatggtgctggtgtcctggattatgtggtacgtacctgtgggcatcatgttccttgttggaagcaagatcgtgaaaaaaaaaaaaagccganttccagcacacttggcggccgttnctagnggatccnagntn

SEQ ID NO: 380 - DNA, 223 bp, Homo Sapiens
  misc_feature 9, 178, 186, 207, 217, 222, 223: n = A,T,C or G
tagggcganttgggccctctacatgcatgctcgagcggccgccagtgtgatggatatctgcagaattcggcttacaacgaggcgacgatggtgctggtgtcctggattatgtggtacgtacctgtgggcatcatgttccttgttggaagcaagatcgtgaaaaaaaaaaaaagccganttccagcncacttggcggccgttactagnggatccgagntcggnn

SEQ ID NO: 381 - DNA, 209 bp, Homo Sapiens
  misc_feature 7, 143, 160, 200, 201, 209: n = A,T,C or G
cctctancatgcatgctcgagcggccgccagtgtgatggatatctgcagaattcggctttacaacgagggagagcgcgtgcgcacagagctggccgacaaggtcaccaagccgaattccagcacactggctggccgttagtantggatccgagcttcggnaccaagcttggcgtaatcatggtcatagctgtttcctgcnntcttttcn

SEQ ID NO: 382 - DNA, 101 bp, Homo Sapiens
tttacaacgaggcgacgatggtgctggtgtcctggattatgtggtacagtacctgtgggcatcatgttccttgttggaagcaagatcgtgaaaaaaaaaaa

SEQ ID NO: 383 - DNA, 340 bp, Homo Sapiens
tttacaacgaggggcggagaccacttgggaccaaagcgaggacatggaatgggagagcgcagtggatgacatgaccaaaaagcaagtatttatttttgattctttggttaagaagtgtttgtttgaagtgctcagcacaaagaacatagctcctagtaatgttacttggttcgtgcagcatgaatggggaaaggaccaaggctggcactgtcatgtgctgattggaggcaaggactttagtcaacctcaaggaaaatggtggagaaggcagctaaatgtgtactggagtagatggttggtgactgcctgtaatgttcaactaacaccggctgaaaaaaaa

SEQ ID NO: 384 - DNA, 337 bp, Homo Sapiens
tttacaacgagggagagcgcgtgcgcacagagctggccgacaaggtcaccaagctgcaggtggagctggacaacgtgaccgggcttctcagccagtccgacagcaagtccagcaagctcaccaaggacttctccgcgctggagtcccagctgcaggacactcaggagctgctgcaggaggagaaccggcagaagctgagcctgagcaccaagctcaagcaggtggaggacgagaagaattccttccgggagcagctggaggaggaggaggaggccaagcacaacctggagaagcagatcgccaccctccatgcccaggtggccgacatgaaaaaaaa

SEQ ID NO: 385 - DNA, 101 bp, Homo Sapiens
tttacaacgaggcgacgatggtgctggtgtcctggattatgtggtaccgtacctgtgggcatcatgttccttgttggaagcaagatcgtgaaaaaaaaaaa

SEQ ID NO: 386 - DNA, 49 bp, Homo Sapiens
ttacaacgagggagagcgcgtgcgcacagagctggccgacaaggtcacc

SEQ ID NO: 387 - DNA, 215 bp, Homo Sapiens
  misc_feature 147, 161: n = A,T,C or G
tttacaacgagggcaaagatgctaaatcttgctttgcattcagtaaagctgtcaagtgattacttgtgtatttgtaccctagatgatatgaaccagcagtcttgttttggcatcatcctcatcatgttgtattccagcttcttaagnggaaggaaaagagngctgagaaatggctctgtataatctatggctatccgaattctctgaaaaaaaaa

SEQ ID NO: 388 - DNA, 343 bp, Homo Sapiens
tttacaacgaggggcggagaccacttgggaccaaagcgaggacatggaatgggagagcgcagtggatgacatgaccaaaaagcaagtatttatttttgattctttggttaagaagtgtttgtttgaagtgctcagcacaaagaacatagctcctagtaatgttacttggttcgtgcagcatgaatggggaaaggaccaaggctggcactgtcatgtgctgattggaggcaaggactttagtcaacctcaaggaaaatggtggagaaggcagctaaatgtgtactggagtagatggttggtgactgcctgtaatgttcaactaacaccagctgaaaaaaaaaaa

SEQ ID NO: 389 - DNA, 27 bp, Homo Sapiens
  misc_feature 20, 26, 27: n = A,T,C or G
tccagcacactggcggccgntactann

SEQ ID NO: 390 - DNA, 343 bp, Homo Sapiens; identical to SEQ ID NO: 388

SEQ ID NO: 391 - DNA, 324 bp, Homo Sapiens
tttacaacgaggggcggagaccacttgggaccaaagcgaggacatggaatgggagagcgcagtggatgacatgaccaaaaagcaagtatttatttttgattctttggttaagaagtgtttgtttgaagtgctcagcacaaagaacatagctcctagtaatgttacttggttcgtgcagcatgaatggggaaaggaccaaggctggcactgtcatgtgctgattggaggcaaggactttagtcaacctcaaggaaaatggtggagaaggcagctaaatgtgtactggagtagatggttggtgactgcctgtaatgttcaactaac

SEQ ID NO: 392 - DNA, 34 bp, Homo Sapiens
  misc_feature 19, 25, 31, 34: n = A,T,C or G
agcacactggcggccgctngtacangcttcnagn

SEQ ID NO: 393 - DNA, 97 bp, Homo Sapiens
tttacaacgaggagggggagaacagcggctgaattggaaatgataaaataaaatgaaattttaggagctcgctgtgagtatgagctgggaaaaaaaa

SEQ ID NO: 394 - DNA, 24 bp, Homo Sapiens
  misc_feature 17, 19, 24: n = A,T,C or G
agcacactggcggccgntnctacn

SEQ ID NO: 395 - DNA, 26 bp, Homo Sapiens
  misc_feature 19, 25, 26: n = A,T,C or G
tcagcacactggcggccgntactann

SEQ ID NO: 396 - DNA, 255 bp, Homo Sapiens
tttacaacgagggcaaagatgctaaatctcgctttgcattcagtaaagtgtcaagtgattaagtgtgtatttgtaccctagatgatatgaaccagcagtcttgttttggcatcatcctcatcatgttgtattccagcttcttaagtggaaggaaaagagtgctgagaaatggctctgtataatctatggctatccgaattctctgaaaaaataataaaagtcccctctattatatgagcctgtacggaaaaaaaa

SEQ ID NO: 397 - DNA, 40 bp, Homo Sapiens
  misc_feature 23, 25, 35, 37, 40: n = A,T,C or G
aattccagcacactggcggccgntngtacaggctncnagn

SEQ ID NO: 398 - DNA, 101 bp, Homo Sapiens
tttacaacgaggagggggagaacagccggctgaattggaaatgataaaataaaatgaaattttaggagctcgctgtgagtatgagctgggaaaaaaaaaaa

SEQ ID NO: 399 - DNA, 160 bp, Homo Sapiens
  misc_feature 129, 146, 151, 158, 160: n = A,T,C or G
tttacaacgaggagggggagaacagcggctgaattggaaatgataaaataaaatgaaattttaggagctcgctgtgagtatgagctgggaaaaaaaaaaaaaaaaaaaaaaaaaaaaaaaaaaaaaaanaaggggggggggggganttttnaaaaaangn

SEQ ID NO: 400 - DNA, 51 bp, Homo Sapiens
  misc_feature 42, 45, 51: n = A,T,C or G
ttacaacgaggaggaggaggaggaggaaaaaaaaaaaaaaangtncaaatn

SEQ ID NO: 401 - DNA, 26 bp, Homo Sapiens
  misc_feature 4, 11, 19, 21, 26: n = A,T,C or G
ccanagcctgnttccttgnanggggn

SEQ ID NO: 402 - DNA, 255 bp, Homo Sapiens
tttacaacgagggcaaagatgctaaatcttgctttgcattcagtaaagtgtcaagtgattaagtgtgtatttgtaccctagatgatatgaaccagcagtcttgttttggcatcatcctcatcatgttgtattccagcttcttaagtggaaggaaaagagtgctgagaaatggctctgtataatctatggctatccgaattctctgaaaaaataataaaagtcccctctattatatgagcctgtacaggaaaaaaa

SEQ ID NO: 403 - DNA, 100 bp, Homo Sapiens
tttacaacgaggagggggagaacagcggctgaattggaaatgataaaataaaatgaaattttaggagctcgctgtgagtatgagctgggaaaaaaaaaaa

SEQ ID NO: 404 - DNA, 36 bp, Homo Sapiens
  misc_feature 27, 29, 36: n = A,T,C or G
agcacactggcggccgctagtacaggntncgagctn

SEQ ID NO: 405 - DNA, 103 bp, Homo Sapiens
  misc_feature 98, 102, 103: n = A,T,C or G
tttacaacgagggcagcgtcactggaagttgttattgtggtaaaaaaaaaaaaaaaaaaaaaaaaaaaaaagggggggggggggaaaaaaaaaaaaancccnn

SEQ ID NO: 406 - DNA, 128 bp, Homo Sapiens
tttacaacgaggaggaggattaagtccacctgtccctcctgggctgctggattgtctcgttttcctgccaaataaacaggatcagcgctttacaacgagggtggtaaggatggggggtaaaaaaaaaa

SEQ ID NO: 407 - DNA, 165 bp, Homo Sapiens
  misc_feature 21, 35, 88, 94, 119, 133, 156, 160: n = A,T,C or G
tttttttttttttactatatncggtatgcatctgnaaacgatgccagatagatcggttttgcagcctcctttttcacttaaggttgtngggganatctgccaagatgttgagtcgtctntgtttctcagcctnggcactgctgacatgtttctgcngggnaattc

SEQ ID NO: 408 - DNA, 192 bp, Homo Sapiens
  misc_feature 171, 182: n = A,T,C or G
tttacaacgaggtcaaactttggacatttcttgaagatagagcctcacttcttttaaaaacatataaaacaactattgaggaagataaatccgtcttgaaaaaccacgatctttctgttcgtgcaaaaatggccatcaaattgcgcttaggtaaaaaaaaaaaaaaaaaanggggggggggnaaaaaaaaaa

SEQ ID NO: 409 - DNA, 37 bp, Homo Sapiens
  misc_feature 32, 34, 37: n = A,T,C or G
ttacaacgaggtaaaaaaaaaaaaaaaaaaananccn

SEQ ID NO: 410 - DNA, 41 bp, Homo Sapiens
ttaggctctatcttcaagaaatgtccaaagtttgacctcgt

SEQ ID NO: 411 - DNA, 42 bp, Homo Sapiens
  misc_feature 25, 30, 35, 41, 42: n = A,T,C or G
aattccagcacactggcggccgctngtacnggctncgagcnn

SEQ ID NO: 412 - DNA, 86 bp, Homo Sapiens
  misc_feature 73, 81, 84, 86: n = A,T,C or G
tttacaacgagggcaaagatgctaaatcttgctttgcattcagtaaagtgtcaagtggtaaaaaaaaaaaaancagtaaanggngn

SEQ ID NO: 413 - DNA, 23 bp, Homo Sapiens
ttacaacgaggtaaaaaaaaaaa

SEQ ID NO: 414 - DNA, 112 bp, Homo Sapiens
tttacaacgagggcatatgggtgggtaatctgaccatcaggaagttttctctaaggaaatggtcattgagagctgaaataagagtaggtgttaacctaggtaaaaaaaaaaa

SEQ ID NO: 415 - DNA, 105 bp, Homo Sapiens
  misc_feature 27, 44, 52, 89: n = A,T,C or G
tttttttttttttcgaaaagcgctgancctgtttatttggcagnaaaacganacaatccagcagcccaggagggacagggggactaaancctcctcctcgttgaa

SEQ ID NO: 416 - DNA, 342 bp, Homo Sapiens
  misc_feature 28, 65, 66: n = A,T,C or G
tttacaacgaggggcggagaccacttgngaccaaagcgaggacatggaatgggagagcgcagtgnntgacatgaccaaaaagcaagtatttatttttgattctttggttaagaagtgtttgtttgaagtgctcagcacaaagaacatagctcctagtaatgttacttggttcgtgcagcatgaatggggaaaggaccaaggctggcactgtcatgtgctgattggaggcaaggactttagtcaacctcaaggaaaatggtggagaaggcagctaaatgtgtactggagtagatggttggtgactgcctgtaatgttcaactaacaccagccgaaaaaaaaaa

SEQ ID NO: 417 - DNA, 257 bp, Homo Sapiens
  misc_feature 116, 150: n = A,T,C or G
tttacaacgagggcaaagatgctaaatcttgctttgcattcagtaaagtgtcaagtgattaagtgtgtatttgtaccctagatgatatgaaccagcagtcttgttttggcatcatnctcatcatgttgtattccagcttcttaagtgganggaaaagagtgctgagaaatggctctgtataatctatggctatccgaattctctgaaaaaataataaaagtcccctctattatatgagcctgtacgaaaaaaaaaaa

SEQ ID NO: 418 - DNA, 101 bp, Homo Sapiens
  misc_feature 27, 42, 52, 56, 64, 71, 83, 89: n = A,T,C or G
tttttttttttttcgaaaagcgctgancctgtttatttggcnggaaaacganacantccagcancccaggngggacagggggnctaaancctcctcctcgt

SEQ ID NO: 419 - DNA, 81 bp, Homo Sapiens
tttacaacgaggtatctagaagagcagaagacagagaatggaaaagataaggaacagaaacaaacaaataccgaaaaaaaa

SEQ ID NO: 420 - DNA, 43 bp, Homo Sapiens
  misc_feature 19, 28, 30, 39, 41, 43: n = A,T,C or G
tttttttttttttcgactntaaaagtananaaccgtcgntntn

SEQ ID NO: 421 - DNA, 84 bp, Homo Sapiens
  misc_feature 27, 52, 71, 83: n = A,T,C or G
tttttttttttttcgaaaagcgctgancctgtttatttggcaggaaaacganacaatccagcagcccaggngggacagggggnc

SEQ ID NO: 422 - DNA, 257 bp, Homo Sapiens
tttacaacgagggcaaagatgctaaatcttgctttgcattcagtaaagtgtcaagtgattaagtgtgtatttgtaccctagatgatatgaaccagcagtcttgtcttggcatcatcctcatcatgttgtattccagcttcttaagtggaaggaaaagagtgctgagaaatggctctgtataatctatggctatccgaattctctgaaaaaataataaaagtcccctctattatatgagcctgtacgaaaaaaaaaaa

SEQ ID NO: 423 - DNA, 217 bp, Homo Sapiens
  misc_feature 151, 165, 179, 201, 209, 216, 217: n = A,T,C or G
cctctagcatgcatgctcgagcggccgccagtgtgatggatatctgcagaattcggctttacaacgaggaggaggattaagtccacctgtccctcctgggctgctggattgtctcgttttcctgccaaataaacaggatcagcgctttacngaaaaaaaaaaaangccgaattccagcncacttggcgggccgttactagnggatccgngctcggnn

SEQ ID NO: 424 - DNA, 229 bp, Homo Sapiens
  misc_feature 89, 107, 125, 144, 159, 162, 194, 222, 226, 229: n = A,T,C or G
atagggcgaattgggccctctagcatgcatgctcgagcggccgccagtgtgatggatatctgcagaattcggctttttttttttttcgnaaagcgctgatcctgttnatttggcaggaaaacganacaatccagcagcccaggngggacagggggactnaancctcctcctcgttgaaaagccgaattccagcncactggcggccgttactaggggatccgngctnggn

SEQ ID NO: 425 - DNA, 347 bp, Homo Sapiens
  misc_feature 289, 299, 313, 321, 325, 339, 345, 347: n = A,T,C or G
aattgggccctctagcatgcatgctcgagcggccgccagtgtgatggatatctgcagaattcggctttacaacgagggcaaagatgctaaatcttgctttgcattcagtaaagtgtcaagtgattaagtgtgtatttgtaccctagatgatatgaaccagcagtcttgttttggcatcatcctcatcatgttgtattccagcttcttaagtggaaggaaaagagtgctgagaaatggctctgtataatctatggctatccgaattctccgaaaaaaaaaaaaagccganttccagcacnctggcgggccgttnctagtggntccnagctcggtaccaancttggngn

SEQ ID NO: 426 - DNA, 241 bp, Homo Sapiens
  misc_feature 170, 193, 208, 209, 223, 238: n = A,T,C or G
tctagatgcatgctcgagcggccgccagtgtgatggatatctgcagaattcggcttacaacgaggcgacgatggtgctggtgtcctggattatgtggtacagtacctgtgggcatcatgttccttgttggaagcaagatcgtgaaaaaaaaaaaaagccgaattccagcncacttggcgggccggttactagnggatccgagctcggnnccaagcttggcggnaatcatggccatagntgt

SEQ ID NO: 427 - DNA, 298 bp, Homo Sapiens
ccctctagatgcatgctcgagcggccgccagtgtgatggatatctgcagaattcggctttacaacgaggtcaatttgatggccatttttgcacgaacagaaagatcgtggtttttcaagacggatttatcttcctcaatagttgttttatatgtttttaatagaagtgaggctctatcttcaagaaatgtccaaagtttgacctcgttgtaaagccgaattccagcacactggcggccgttactagtggatccgagctcggtaccaagcttggcgtaatcatggtcatagctgtttcc

SEQ ID NO: 428 - DNA, 491 bp, Homo Sapiens
  misc_feature 12, 421, 441: n = A,T,C or G
tgggccctctancatgcatgctcgagcggccgccagtgtgatggatatctgcagaattcggctttacaacgaggggcggagaccacttgggaccaaagcgaggacatggaatgggagagcgcagtggatgacatgaccaaaaagcaagtatttatttttgattctttggttaagaagtgtttgtttgaagtgctcagcacaaagaacatagctcctagtaatgttacttggttcgtgcagcatgaatggggaaaggaccaaggctggcactgtcatgtgctgattggaggcaaggactttagtcaacctcaaggaaaatggtggagaaggcagctaaatgtgtactggagtagatggttggtgactgcctgtaatgttcaactaacaccagctgaaaaaaaaaaaaagccgaattccagcncactggcggccgttactagnggatccgagctcggtaccaagcttggcgtaatcatggccatagctgtttc

SEQ ID NO: 429 - DNA, 424 bp, Homo Sapiens
  misc_feature 4, 420: n = A,T,C or G
cganttgggccctctacatgcatgctcgagcggccgccagtgtgatggatatctgcagaattcggctttacaacgaggggctggagaccacttgggaccaaagcgaggacatggaatgggagagctgcagtggatgacatgaccaaaaagcaagtatttatttttgattctttggctaagaagtgtttgtttgaagtgctcagcacaaggaacatagctcctagtaatgttacttggtttgtgcagcatgaatggggaaaggaccaaggctggcactgtcatgtgctgattggaggcaaggactttagtcaacctcaaggaaaatggtggagaaggcagctaaatgtgtactggagtagatggttggtgactgcctgtaatgttcaactaacaccagctgaaaaaaaaaaaaaagccganttcc

SEQ ID NO: 430 - DNA, 421 bp, Homo Sapiens
  misc_feature 276, 405, 417, 419, 421: n = A,T,C or G
gggccctctacagcatgctcgagcggccgccagtgtgatggatatctgcagaattcggctttacaacgaggggcggagaccacttgggaccaaagcgaggacatggaatgggagagcgcagtggatgacatgaccaaaaagcaagtatttatttttgattctttggttaagaagtgtttgtttgaagtgctcagcacaaagaacatagctcctagtaatgttacttggttcgtgcagcatgaatggggaaaggaccaaggctggcactgtcatgtnctgattggaggcaaggactttagtcaacctcaaggaaaatggtggagaaggcagctaaatgtgtactggagtagatggttggtgactgcctgtaatgttcaactaacaccagctgaaaaaaaaaaaaanccggaattccancncn

SEQ ID NO: 431 - DNA, 258 bp, Homo Sapiens
  misc_feature 4, 221, 227, 242, 250, 255, 258: n = A,T,C or G
ctanatgcatgctcgagcggccgccagtgtgatggatatctgcagaattcggctttacaacgaggcaaaacaaaaacaaacaaaaatcccaataacaataattataaaaaaaatcccaaggcagatttatttgtactgacatggaacacataggtgatagaaaaaatgcaatgtaagtagtatgtatccaatgctaccatctctgctgaaaaaaaaaaaangccganttccagcacactggnggccgttnctagnggn

SEQ ID NO: 432 - DNA, 420 bp, Homo Sapiens
  misc_feature 17, 80, 417: n = A,T,C or G
gatttgggccctctacngcatgctcgagcggccgccagtgtgatggatatctgcagaattcggctttacaacgaggggcnggagaccacttgggaccaaagcgaggacatggaatgggagagcgcagtggatgacatgaccaaaaagcaagtatttatttttgattctttggttaagaagtgtttgtttgaagtgctcagcacaaagaacatagctcctagtaatgttacttggttcgtgcagcatgaatggggaaaggaccaaggctggcactgtcatgtgctgattggaggcaaggactttagtcaacctcaaggaaaatggtggagaaggcagctaaatgtgtactggagtagatggttggtgactgcctgtaatgttcaactaacaccagctgaaaaaaaaaaaaagccgaantcc

SEQ ID NO: 433 - DNA, 403 bp, Homo Sapiens
  misc_feature 218: n = A,T,C or G
ctctagcatgcatgctcgagcggccgccagtgtgatggatatctgcagaattcggctttacaacgaggggcggagaccacttgggaccaaagcgaggacatggaatgggagagcgcagtggatgacatgaccaaaaagcaagtatttatttttgattctttggttaagaagtgtttgtttgaagtgctcagcacaaagaacatagctcctagtaatgntacttggttcgtgcagcatgaatggggaaaggaccaaggctggcactgtcatgtgctgattggaggcaaggactttagtcaacctcaaggaaaatggtggagaaggcagctaaatgtgtactggagtagatggttggtgactgcctgtaatgttcaactaacaccagctgaaaaaaaaaaaaagc

SEQ ID NO: 434 - DNA, 191 bp, Homo Sapiens
ctctagcagcatgctcgagcggccgccagtgtgatggatatctgcagaattcggcttcaccaaaacctataaggcaagagacactattatgccctcgttgtaaagccgaattccagcacactggcggccgttactagtggatccgagctcggtaccaagcttggctgtaatcatggtcatagctgtttcct

SEQ ID NO: 435 - DNA, 22 bp, Homo Sapiens
  misc_feature 11, 15, 21, 22: n = A,T,C or G
tttcctgaggnctgnccatgnn

SEQ ID NO: 436 - DNA, 224 bp, Homo Sapiens
  misc_feature 181, 217, 221, 224: n = A,T,C or G
tagggcgaattgggccctctagcatgcatgctcgagcggccgccagtgtgatggatatctgcagaattcggctttacaacgaggcgacgatggtgctggtgtcctggattatgtggtacagtacctgtgggcatcatgttccttgttggaagcaagatcgtgaaaaaaaaaaaaagccganttccagcacactggcggccgttactaggggatccgngctnggn

SEQ ID NO: 437 - DNA, 141 bp, Homo Sapiens
attgggccctctagcatgcatgctcgagcggccgccagtgtgatggatatctgcagaattaattccagcacactggcggccgttactagtggatccgagctcggtaccaagcttggctgtaatcatggtcatagctgtttc

SEQ ID NO: 438 - DNA, 420 bp, Homo Sapiens
  misc_feature 418: n = A,T,C or G
aattgggccctctacatgcatgctcgagcggccgccagtgtgatggatatctgcagaattcggctttacaacgaggggcggagaccacttgggaccaaagcgaggacatggaatgggagagcgcagtggatgacatgaccaaaaagcaagtatttatttttgattctttggctaagaagtgtttgtttgaagtgctcagcacaaggaacatagctcctagtaatgttacttggtttgtgcagcatgaatggggaaaggaccaaggctggcactgtcatgtgctgattggaggcaaggactttagtcaacctcaaggaaaatggtggagaaggcagctaaatgtgtactggagtagatggttggtgactgcctgtaatgttcaactaacaccagctgaaaaaaaaaaaaaagccgaatncc

SEQ ID NO: 439 - DNA, 162 bp, Homo Sapiens
ccagtgtgatggatatctgcagaattcggctttacaacgaggcgacgatggtgctggtgtcctggattatgtggtacagtacctgtgggcatcatgttccttgttggaagcaagatcgtgaaaaaaaaaaaaagccgaattccagcacactggcgggccgtt

SEQ ID NO: 440 - DNA, 128 bp, Homo Sapiens
  misc_feature 102, 122, 123, 128: n = A,T,C or G
ttgggccctctagcagcatgctcgagcggccgccagtgtgatggatatctgcagaattcggctttacaacgaggcgaaacaaaaacacacacaaatcccccnatcactattattataaaaannccccn

SEQ ID NO: 441 - DNA, 24 bp, Homo Sapiens
  misc_feature 21: n = A,T,C or G
tgtttcctgacctctatacangcg

SEQ ID NO: 442 - DNA, 530 bp, Homo Sapiens
agggcgaattgggccctctagctgcatgctcgagcggccgccagtgtgatggatatctgcagaattcggctttacaacgaggggcggagaccacttgggaccaaagcgaggacatggaatgggagagcgcagtggatgacatgaccaaaaagttcaatgcgctcgccatctctgactccgagaagtacgcctgcggacctagctctagagccttggagcacaccaaatactcctgttgcgggcactgcagcaagccaaaacactgcggaggctggttccacagcctgccaaggtgctcaacggagcccaacctggtccgagatcgaggcggatttgagagcttgcttcagtcaagaacagttggagagcgacttcaacgaggagctgaccttggactaaggcctgaaatcacttggttctaggttgggtgcctcctggctacaagtacctgggaccagggaacagccttgaccaaggagaaccaaccaacccttctgacgccgctgccaaagagcacgacgaagcctacg

SEQ ID NO: 443 - DNA, 325 bp, Homo Sapiens
  misc_feature 265, 267: n = A,T,C or G
ctctagatgcatgctcgagcggccgccagtgtgatggatatctgcagaattcggcttgctgcagtgcccgcaacaggagtatttggtgtgctccaaggctctagagctaggtccgcaggcgtacttctcggagtcagagatggtgagcgcattgaactttttggtcatgtcatccactgcgctctcccattccatgtcctcgctttggtcccaagtggtctccgcccctcgttgtaaagccgaattccagcacactggcggccgntngtactggatccgagctcggtaccaagcttggcgtaatcatggtcatagctgttttcct

SEQ ID NO: 444 - DNA, 515 bp, Homo Sapiens
ctctagctgcatgctcgagcggccgccagtgtgatggatatctgcagaattcggctttacaacgaggggcggagaccacttgggaccaaagcgaggacatggaatgggagagcgcagtggacgacatgaccaaaaagttcaatgcgctcaccatctctgactccgagaagtacgcctgcggacctagctctagagccttggagcacaccaaatactcctgttgcgggcactgcagcaagccaaaacactgcggaggctggttccacagcctgccaaggtgctcaacggagcccaacctggtccgagatcgaggcggatttgagagcttgcttcagtcaagaacagttggagagcgacttcaacgaggagctgaccttggactaaggcctgaaatcacttggttctaggttgggtgcctcctggctacaagtacctgggaccagggaacagccttgaccaaggagaaccaaccaacccttctgacgccgctgccaaagagcacgacgaagcctacg

SEQ ID NO: 445 - DNA, 516 bp, Homo Sapiens
ctctagctgcatgctcgagcggccgccagtgtgatggatatctgcagaattcggctttacaacgaggggcggagaccacttgggaccaaagcgaggacatggaatgggagagcgcagtggatgacatgaccaaaaagttcaatgcgctcaccatctctgactccgagaagtacgcctgcggacctagctctagagccttggagcacaccaaatactcctgttgcgggcactgcagcaagccaaaacactgcggaggctggttccacagcctgccaaggtgctcaacggagcccaacctggtccgagatcgaggcggatttgagagcttgcttcagtcaagaacagttggagagcgacttcaacgaggagctgaccttggactaaggcctgaaatcacttggttctaggttgggtgcctcccggctacaagtacctgggaccagggaacagccttgaccaaggagaaccaaccaacccttctgacgccgctgccaaagagcacgacgaagcctacga

SEQ ID NO: 446 - DNA, 185 bp, Homo Sapiens
  misc_feature 125, 130, 143, 146, 153, 164: n = A,T,C or G
ctctagcatgcatgctcgagcggccgccagtgtgatggatatctgcagaattcggctttacaacgaggcgacgatggtctccgcccctcgttgtaagccgaattccagcacactggcggccgttngtacnggatccgagcgtngcnaccaagnttggctgtaancatggtcatagctgtcttcct

SEQ ID NO: 447 - DNA, 516 bp, Homo Sapiens
  misc_feature 177: n = A,T,C or G
ctctagctgcatgctcgagcggccgccagtgtgatggatatctgcagaattcggctttacaacgaggggcggagaccacttgggaccaaagcgaggacatggaatgggagagcgcagtggatgacatgaccaaaaagttcaatgcgctcaccatctctgactccgagaagtacgccngcggacctagctctagagccttggagcacaccaaatactcctgttgcgggcactgcagcaagccaaaacactgcggaggctggttccacagcctgccaaggtgctcaacggagcccaacctggtccgagatcgaggcggatttgagagcttgcttcagtcaagaacagttggagagcgacttcaacgaggagctgactttggactaaggcctgaaatcacttggttctaggttgggtgcctcctggctacaagtacctgggaccagggaacagccttgaccaaggagaaccaaccaacccttctgacgccgctgccaaagagcacgacgaagcctacga

SEQ ID NO: 448 - DNA, 81 bp, Homo Sapiens
  misc_feature 72, 79, 81: n = A,T,C or G
ctctagatgcatgctcgagcggccgccagtgtgatggatatctgcagaattcggctttttttttttttccanatttgangn

SEQ ID NO: 449 - DNA, 171 bp, Homo Sapiens
  misc_feature 157, 163, 169, 171: n = A,T,C or G
ctctagctgcatgctcgagcggccgccagtgtgatggatatctgcagaattcggctttacaacgaggagggggagaacagcggctgaattggaaatgataaaataaaatgaaattttaggagctcgctgtgagtatgagctgggaaaaaaaaaaaangccganttccancn

SEQ ID NO: 450 - DNA, 530 bp, Homo Sapiens
agggcgaattgggccctctagctgcatgctcgagcggccgccagtgtgatggatatctgcagaattcggctttacaacgaggggcggagaccacttgggaccaaagcgaggacatggaatgggagagcgcagtggatgacatgaccaaaaagttcaatgcgctcaccatctctgactccgagaagtacgcctgcggacctagctctagagccttggagcacaccaaatactcctgttgcgggcactgcagcaagccaaaacactgcggaggctggttccacagcctgccaaggtgctcaacggagcccaacctggtccgagatcgaggcggatttgagagcttgcttcagtcaagaacagttggagagcgacttcaacgaggagctgaccttggactaaggcctgaaatcacttggttctaggttgggtgcctcctggctacaagtacctgggaccagggaacagccttgaccaaggagaaccaaccaacccttctgacgccgctgccaaagagcacgacgaagcctacg

SEQ ID NO: 451 - DNA, 516 bp, Homo Sapiens
ctctagatgcatgctcgagcggccgccagtgtgatggatatctgcagaattcggctttacaacgaggggcggagaccacttgggaccaaagcgaggacatggaatgggagagcgcagtggatgacatgaccaaaaagttcaatgcgctcaccatctctgactccgagaagtacgcctgcggacctagctctagagccttggagcacaccaaatactcctgttgcgggcactgcagcaagccaaaacactgcggaggctggttccacagcctgccaaggtgctcaacggagcccaacctggtccgagatcgaggcggatttgagagcttgcttcagtcaagaacagttggagagcgacttcaacgaggagctgaccttggactaaggcctgaaatcacttggttctaggttgggtgcctcctggctacaagtacctgggaccagggaacagccttgaccaaggagaaccaaccaacccttctgacgccgctgccaaagagcacgacgaagcctacga

SEQ ID NO: 452 - DNA, 412 bp, Homo Sapiens
  misc_feature 374, 408, 411, 412: n = A,T,C or G
ctctagctgcatgctcgagcggccgccagtgtgatggatatctgcagaattcggctttacaacgaggaatacaaaatatggaaaaagaacaccccttttctttatgatttggtgatgacccatgctctggagtggcccagcctaactgcccagtggcttccagatgtaaccagaccagaagggaaagatttcagcattcatcgacttgtcctggggacacacacatcggatgaacaaaaccatcttgttatagccagtgtgcagctccctaatgatgatgctcagtttgatgcgtcacactacgacagtgagaaaggagaatttggaggttttggttcagttagtggaaaaaaaaaaaaagccgaattccagcncactgggcgggccgttactaggggatccgagctnggnn

SEQ ID NO: 453 - DNA, 102 bp, Homo Sapiens
  misc_feature 101: n = A,T,C or G
agggcgaattgggccctctagatgcatgctcgagcggccgccagtgtgatggatatctgcagaattcggctagccgaattccagcacactggcggccgctng

SEQ ID NO: 454 - DNA, 156 bp, Homo Sapiens
  misc_feature 90, 95, 106, 149, 151, 156: n = A,T,C or G
agggcgaattgggccctctagcatgcatgctcgagcggccgccagtgtgatggatatctgcagaattcggctttacaacgaggggcgganaccanttgggaccatngcgaggaagccgaattccagcacactggcggccgctcgtgcangnttcgn

SEQ ID NO: 455 - DNA, 186 bp, Homo Sapiens
  misc_feature 84, 178, 184, 186: n = A,T,C or G
agggcgaattgggccctctagctgcatgctcgagcggccgccagtgtgatggatatctgcagaattcggctttacaacgagganggggagaacagcggctgaattggaaatgataaaataaaatgaaattttaggagctcgctgtgagtatgagctgggaaaaaaaaaaaaagccganttccancn

SEQ ID NO: 456 - DNA, 530 bp, Homo Sapiens
agggcgaattgggccctctagctgcatgctcgagcggccgccagtgtgatggatatctgcagaattcggctttacaacgaggggcggagaccacttgggaccaaagcgaggacatggaatgggagagcgcagtggatgacatgaccaaaaagttcaatgcgctcaccatctctgactccgagaagtacgcctgcggacctagctctagagccttggagcacaccaaatactcctgttgcgggcactgcagcaagccaaagcactgcggaggctggttccacagcctgccaaggtgctcaacggagcccaacctggtccgagatcgaggcggatttgagagcttgcttcagtcaagaacagttggagagcgacttcaacgaggagctgaccttggactaaggcctgaaatcacttggttctaggttgggtgcctcctggctacaagtacctgggaccagggaacagccttgaccaaggagaaccaaccaacccttctgacgccgctgccaaagagcacgacgaagcctacg

SEQ ID NO: 457 - DNA, 91 bp, Homo Sapiens
  misc_feature 5, 76, 86, 90, 91: n = A,T,C or G
tgttnactgggccctctacatgcatgctcgatcggccgccagtgtgatggatatctgcagaattcggctttgaatnggaagaaggnaaann

SEQ ID NO: 458 - DNA, 516 bp, Homo Sapiens
  misc_feature 7: n = A,T,C or G
ctctagntgcatgctcgagcggccgccagtgtgatggatatctgcagaattcggctttacaacgaggggcggagaccacttgggaccaaagcgaggacatggaatgggagagcgcagtggatgacatgaccaaaaagttcaatgcgctcaccatctctgactccgagaagtacgcctgcggacctagctctagagccttggagcacaccaaatactcctgttgcgggcactgcagcaagccaaaacactgcggaggctggttccacagcctgccaaggtgctcaacggagcccaacctggtccgagatcgaggcggatttgagagcttgcttcagtcaagaacagttggagagcgacttcaacgaggagctgaccttggactaaggcctgaaatcacttggttctaggttgggtgcctcctggctacaagtacctgggaccagggaacagccttgaccaaggagaaccaaccaacccttctgacgccgctgccaaagagcacgacgaagcctacga

SEQ ID NO: 459 - DNA, 413 bp, Homo Sapiens
  misc_feature 367, 392, 405, 409, 413: n = A,T,C or G
ctctagcatgcatgctcgagcggccgccagtgtgatggatatctgcagaattcggctttacaacgaggaatacaaaatatggaaaaagaacaccccttttctttatgatttggtgatgacccatgctctggagtggcccagcctaactgcccagtggcttccagatgtaaccagaccagaagggaaagatttcagcattcatcgacttgtcctggggacacacacatcggatgaacaaaaccatcttgttatagccagtgtgcagctccctaatgatgatgctcagtttgatgcgtcacactacgacagtgagaaaggagaatttggaggttttggttcagttagtggaaaaaaaaaaaaagccganttccagcacactgggcgggccgttnctaggggatccgngctnggtn

SEQ ID NO: 460 - DNA, 340 bp, Homo Sapiens
  misc_feature 337: n = A,T,C or G
agggcgaattgggccctctagcatgcatgctcgagcggccgccagtgtgatggatatctgcagaattcggctttacaacgagggcaaagatgctaaatcttgctttgcattcagtaaagtgtcaagtgattaagtgtgtatttgtaccctagatgatatgaaccagcagtcttgttttggcatcatcctcatcatgttgtattccagcttcttaagtggaaggaaaagagtgctgagaaatggctctgtataatctatggctatccgaattctctgaaaaaataataaaagtcccctctattatatgagcctgtacggaaaaaaaaaaaaagccganttc

SEQ ID NO: 461 - DNA, 315 bp, Homo Sapiens
  misc_feature 241, 265, 272, 276, 306, 307, 315: n = A,T,C or G
gcgaattgggccctctagatgcatgctcgagcggccgccagtgtgatggatatctgcagaattcggctttacaacgaggaatacaaaatatggaaaaagaacaccccttttctttatgatttggtgatgacccatgctctggagtggcccagcctaactgcccagtggcttccagatgtaaccagaccagaagggaaagatttcagcattcatcgacttgtcctggggacacacacatcgnatgaacaaaaccatcttgttatanccagtgngcanctccctaatgatgatgctcagtttgatgcnncacactan

SEQ ID NO: 462 - DNA, 517 bp, Homo Sapiens
ctctagatgcatgctcgagcggccgccagtgtgatggatatctgcagaattcggctttacaacgaggggcggagaccacttgggaccaaagcgaggacatggaatgggagagcgcagtggatgacatgaccaaaaagttcaatgcgctcaccatctctgactccgagaagtacgcctgcggacctagctctagagccttggagcacaccaaatactcctgttgcgggcactgcagcaagccaaaacactgcggaggctggttccacagcctgccaaggtgctcaacggagcccaacctggtccgagatcgaggcggatttgagagcttgcttcagtcaagaacggttggagagcgacttcaacgaggagctgaccttggactaaggcctgaaatcacttggttctaggttgggtgcctcctggctacaagtacctgggaccagggaacagccttgaccaaggagaaccaaccaacccttctgacgccgctgccaaagagcacgacgaagccgaattc

SEQ ID NO: 463 - DNA, 409 bp, Homo Sapiens
  misc_feature 387, 395, 404, 405, 409: n = A,T,C or G
ggcgaattgggccctctagatgcatgctcgagcggccgccagtgtgatggatatctgcagaattcggctttacaacgaggaatacaaaatatggaaaaagaacaccccttttctttatgatttggtgatgacccatgctctggagtggcccagcctaactgcccagtggcttccagatgtaaccagaccagaagggaaagatttcagcattcatcgacttgtcctggggacacacacatcggatgaacaaaaccatcttgttatagccagtgtgcagctccctaatgatgatgctcagtttgatgcgtcacactacgacagtgagaaaggagaatttggaggttttggttcagttagtggaaaaaaaaaaaaagccgaattccagcncactgggngggccgttnntagn

SEQ ID NO: 464 - DNA, 36 bp, Homo Sapiens
  misc_feature 4, 15, 29, 33, 36: n = A,T,C or G
tttnctgagcccttnacagcatgctcgancggncgn

SEQ ID NO: 465 - DNA, 19 bp, Homo Sapiens
  misc_feature 18: n = A,T,C or G
agggcgaattgggccctnt

SEQ ID NO: 466 - DNA, 244 bp, Homo Sapiens
  misc_feature 159, 169, 224, 230, 234: n = A,T,C or G
ctctagctgcatgctcgagcggccgccagtgtgatggatatctgcagaattcggctttacaacgaggcagggtatgatgttaagactttagaagtgggcggggaccagatcatgtgtagtcttagaggtaattagctgagattttactctgaatacacntgggaagacntggaaatttaaaagatgatacttggctattatgtggaaaaaaaaaaaaagccganttccancccnctggcggccg

SEQ ID NO: 467 - DNA, 112 bp, Homo Sapiens
  misc_feature 79, 104, 109, 112: n = A,T,C or G
ctctagctgcatgctcgagcggccgccagtgtgatggatatctgcagaattcggcttacaacgaggaaaaaaaaaaaanggggggggggggaaaaaaaaaaaancccanttn

SEQ ID NO: 468 - DNA, 107 bp, Homo Sapiens
  misc_feature 103, 104, 107: n = A,T,C or G
ctctagcatgcatgctcgagcggccgccagtgtgatggatatctgcagaattcggcttcccctcgttgtaaagccgaattccagcacactggcggccgctcgnncan

SEQ ID NO: 469 - DNA, 256 bp, Homo Sapiens
  misc_feature 186, 241, 249, 251, 256: n = A,T,C or G
atagggcgaattgggccctctagctgcatgctcgagcggccgccagtgtgatggatatctgcagaattcggctttacaacgaggcagggtatgatgttaagactttagaagtgggcggggaccagattatgtgtagtcttagaggtaattagctgagattttactctgaatacacctgggaagacntggaaatttaaaagatgatacctggctattatgtggaaaaaaaaaaaaagccganttccagcncnctggn

SEQ ID NO: 470 - DNA, 42 bp, Homo Sapiens
  misc_feature 3, 13, 18, 33, 36, 42: n = A,T,C or G
ttnctgagccctntaacngcatgctcgagcggncgncagtgn

SEQ ID NO: 471 - DNA, 247 bp, Homo Sapiens
ctctagcagcatgctcgagcggccgccagtgtgatggatatctgcagaattcggcttacaacgaggggcggagaccacttgggaccaaagcgaggacatggaatgggagagcgcagtggatgacatgaccaaaaagcaagtatttatttttgattctttggttaagaagtgtttgtttgaagtgctcagcacaaagaacatagctcctagtaatattacatgtcctcgcttttggtcccaagtggtc

SEQ ID NO: 472 - DNA, 275 bp, Homo Sapiens
  misc_feature 7, 216, 230, 246, 266, 267, 275: n = A,T,C or G
ctctagntgcatgctcgagcggccgccagtgtgatggatatctgcagaattcggctttacaacgaggcagggtatgatgttaagactttagaagtgggcggggaccagattatgtgtagtcttagaggtaattagctgagattttactctgaatacactgggaagacctggaaatttaaaagatgatactggctattatgtggaaaaaaaaaaaangccgaattccagcncactgggcggccgttnctaggggatccgagctcggnnccaagctn

SEQ ID NO: 473 - DNA, 245 bp, Homo Sapiens
  misc_feature 231, 237, 243, 245: n = A,T,C or G
agggcgaattgggccctctagctgcatgctcgagcggccgccagtgtgatggatatctgcagaattcggctttacaacgaggcagggtatgatgttaagactttagaagtgggcggggaccagattatgtgtagtcttagaggtaattagctgagattttactctgaatacacctgggaagactggaaatttaaaagatgatactggctattatgtggaaaaaaaaaaaangccganttccancn

SEQ ID NO: 474 - DNA, 82 bp, Homo Sapiens
  misc_feature 76, 79, 82: n = A,T,C or G
ctctagatgcatgctcgagcggccgccagtgtgatggatatctgcagaattaattccagcacactggcggccgctngtncan

SEQ ID NO: 475 - DNA, 251 bp, Homo Sapiens
  misc_feature 236, 242, 246, 251: n = A,T,C or G
gggcgaattgggccctctagctgcatgctcgagcggccgccagtgtgatggatatctgcagaattcggctttacaacgaggcagggtatgatgttaagactttagaagtgggcggggaccagattatgtgtagtcttagaggtaattagctgagattttactctgaatacacctgggaagactggaaatttaaaagatgatactggctattatgtggaaaaaaaaaaaaagccganttccancccnctggn

SEQ ID NO: 476 - DNA, 230 bp, Homo Sapiens
  misc_feature 227: n = A,T,C or G
ctctagctgcatgctcgagcggccgccagtgtgatggatatctgcagaattcggctttacaacgagggagaagatagcagtgttatccactacgatgataaggccattgaacggctgctagaccgtaaccaggatgagactgaagacacagaattgcagggcatgaatgaatatttgagctcattcaaagtggcccagtatgtggtacgggaaaaaaaaaaaagccnaat

SEQ ID NO: 477 - DNA, 103 bp, Homo Sapiens
  misc_feature 21, 23, 57, 83, 90, 103: n = A,T,C or G
agggcgaattgggccctctancngcatgctcgagcggccgccagtgtgatggatatntgcagaattcggctttacattcgagncgaaggnaagaaagaaaaan

SEQ ID NO: 478 - DNA, 140 bp, Homo Sapiens
  misc_feature 8, 21, 133, 137, 140: n = A,T,C or G
gctgtttnctgagccctctancatgcatgctcgagcggccgccagtgtgatggatatctgcagaattcggctttacaacgaggcgacgatggtgctggtgtcctggattatgtggacagtacctgtgggcatnatgntcn

SEQ ID NO: 479 - DNA, 132 bp, Homo Sapiens
  misc_feature 100, 110, 126, 131, 132: n = A,T,C or G
atagggcgaattgggccctctagcatgcatgctcgagcggccgccagtgtgatggatatctgcagaattcggcttaattccagcacactggcggccgctngtacaggctncgagctcgccaccaancttgnn

SEQ ID NO: 480 - DNA, 228 bp, Homo Sapiens
  misc_feature 197, 205, 207, 220, 225, 228: n = A,T,C or G
agggcgaattgggccctctagctgcatgctcgagcggccgccagtgtgatggatatctgcagaattcggctttggattggtcagaagtgaaggaagagaaggataacttggagataaaacaggaggagaagtttgttggtcaatgcataaaagaggaattgatgcatggagagtgtgtaaaaaaaaaaaaagccganttccagcncnctggcggccgttnctagnggn

SEQ ID NO: 481 - DNA, 229 bp, Homo Sapiens
  misc_feature 205, 207, 225, 226, 229: n = A,T,C or G
agggcgaattgggccctctagctgcatgctcgagcggccgccagtgtgatggatatctgcagaattcggctttggattggtcagaagtgaaggaagagaaggataacttggagataaaacaggaggagaagtttgttggtcaatgcataaaagaggaattgatgcatggagagtgtgtaaaaaaaaaaaaagccgaattccagcncnctgggcggccgttcctannggn

SEQ ID NO: 482 - DNA, 100 bp, Homo Sapiens
  misc_feature 96, 97, 100: n = A,T,C or G
tagggcgaattgggccctctagcatgcatgctcgagcggccgccagtgtgatggatatctgcagaattcggctttggattggtccaaaaaagggcnngan

SEQ ID NO: 483 - DNA, 231 bp, Homo Sapiens
  misc_feature 182, 190, 208, 210, 222, 224, 231: n = A,T,C or G
ctctagctgcatgctcgagcggccgccagtgtgatggatatctgcagaattcggctttggattggtcagaagtgaaggaagagaaggataacttggagataaaacaggaggaaaagtttgttggtcaatgcataaaagaggaattgatgcatggagagtgtgtaaaaaaaaaaaaagccganttccagcncactggcggccgttcctncnggctccgagctngnccccaan

SEQ ID NO: 484 - DNA, 222 bp, Homo Sapiens
  misc_feature 7, 182, 190, 192, 206, 208, 218, 221, 222: n = A,T,C or G
ctctagntgcatgctcgagcggccgccagtgtgatggatatctgcagaattcggctttggattggtcagaagtgaaggaagagaaggataacttggagataaaacaggaggagaagtttgttggtcaatgcataaaagaggaattgatgcatggagagtgtgtaaaaaaaaaaaaagccganttccagcncnctggcggccgttcntnctggctccgngcnn

SEQ ID NO: 485 - DNA, 208 bp, Homo Sapiens
  misc_feature 182, 190, 192, 203, 206, 208: n = A,T,C or G
ctctagctgcatgctcgagcggccgccagtgtgatggatatctgcagaattcggctttggattggtcagaagtgaaggaagagaaggataacttggagataaaacaggaggagaagtttgttggtcaatgcataaaagaggaattgatgcatggagagtgtgtaaaaaaaaaaaaagccganttccagcncnctggcggccgntcntn

SEQ ID NO: 486 - DNA, 119 bp, Homo Sapiens
  misc_feature 58, 90: n = A,T,C or G
tttggattggtcagaagtgaaggaagagaaggataacttggagataaaacaggagganaagtttgttggtcaatgcataaaacaggaatngatgcatggagagtgtgtaaaaaaaaaaa

SEQ ID NO: 487 - DNA, 116 bp, Homo Sapiens
tttggattggtcagaagtgaaggaagagaaggataacttggagataaaacaggaggagaagtttgttggtcaatgcataaaagaggaattgatgcatggagagtgtgtaaaaaaaa

SEQ ID NO: 488 - DNA, 79 bp, Homo Sapiens
ttggattggtcagaagtgaaggaagagaaggataacttggagataaaacaggaggagaagtttgttggtcaatgcataa

SEQ ID NO: 489 - DNA, 209 bp, Homo Sapiens
  misc_feature 127, 135, 153, 163, 165, 173, 178, 185: n = A,T,C or G
tttggattggtcagaagtgaaggaagagaaggataacttggagataaaacaggaggagaagtttgttggtcaatgcataaaagaggaattgatgcatggagtgtgtgtaaaaaaaaaaaaagccganttccagcncactggcggccgctcgtnctggctccgngngggccccntaacnttggcgnaatcatggccatagctgttttcct

SEQ ID NO: 490 - DNA, 116 bp, Homo Sapiens
tttggattggtcagaagtgaaggaagagaaggataacttggagataaaacaggaggaaaagtttgttggtcaatgcataaaagaggaattgatgcatggagagtgtgtaaaaaaaa

SEQ ID NO: 491 - DNA, 114 bp, Homo Sapiens
tttggattggtcagaagtgaaggaagagaaggataacttggagataaaacaggaggagaagtttgttggtcaatgcataaaagaggaattgatgcatggagagtgtgtaaaaaa

SEQ ID NO: 492 - DNA, 106 bp, Homo Sapiens
ttggattggtcaagcaatgatgtcataacctgcaggtctgcttgattattgtcataagctggtggcctggggagtgaggtgtgggcccgaatgtgtgtaaaaaaaa

SEQ ID NO: 493 - DNA, 116 bp, Homo Sapiens; identical to SEQ ID NO: 487

SEQ ID NO: 494 - DNA, 119 bp, Homo Sapiens
tttggattggtcagaagtgaaggaagagaaggataacttggagataaaacaggaggagaagtttgttggtcaatgcataaaagaggaattgatgcatggagagtgtgtaaaaaaaaaaa

SEQ ID NO: 495 - DNA, 79 bp, Homo Sapiens; identical to SEQ ID NO: 488

SEQ ID NO: 496 - DNA, 189 bp, Homo Sapiens
tttggattggtcctccttggcagaaatttagataaggatatccttaaacagctgtttatagctactgtgacagaaacagaaaagcagtggacaacacatttcaaagaagatcaagtttgtacataacactagaggcatttcttatcaaaaggattggataataaaaataagtttctactgggtaaaaaa

SEQ ID NO: 497 - DNA, 116 bp, Homo Sapiens; identical to SEQ ID NO: 487

SEQ ID NO: 498 - DNA, 116 bp, Homo Sapiens
tttggattggtcagaagtgaaggaagagaaggataacttggagataaaacaggaggagaagtttgttggtcaatgcataaaagaggaattgatgcatggagtgtgtgtaaaaaaaa

SEQ ID NO: 499 - DNA, 194 bp, Homo Sapiens
  misc_feature 16: n = A,T,C or G
tttggattggtcctcnttggcagaaatttagataaggatatccttaaacagctgtttatagctactgtgacagaaacagaaaagcagtggacaacacatttcaaagaagatcaagtttgtacataacactagaggcatttcttatcaaaaggattggataataaaaataagtttctactgggtaaaaaaaaaaa

SEQ ID NO: 500 - DNA, 42 bp, Homo Sapiens
  misc_feature 27, 37, 39, 42: n = A,T,C or G
ttaattccagcacactggcggccgctngtacaggctncnagn

SEQ ID NO: 501 - DNA, 106 bp, Homo Sapiens; identical to SEQ ID NO: 492

SEQ ID NO: 502 - DNA, 17 bp, Homo Sapiens
ttactacactgaccaat

SEQ ID NO: 503 - DNA, 116 bp, Homo Sapiens; identical to SEQ ID NO: 487

SEQ ID NO: 504 - DNA, 119 bp, Homo Sapiens; identical to SEQ ID NO: 494

SEQ ID NO: 505 - DNA, 33 bp, Homo Sapiens
  misc_feature 27, 30, 33: n = A,T,C or G
ttaattccagcacactggcggccgctngtncan

SEQ ID NO: 506 - DNA, 116 bp, Homo Sapiens; identical to SEQ ID NO: 487

SEQ ID NO: 507 - DNA, 42 bp, Homo Sapiens; identical to SEQ ID NO: 132
  misc_feature 29, 36, 39, 42: n = A,T,C or G

SEQ ID NO: 508 - DNA, 119 bp, Homo Sapiens
tttggattggtcagtgtagttgatgtaaaaccgttttgtggatggaaaatatttttattttattgctcttttagtttggtaggttaaataaaggttcttggtaatttgggtaaaaaaaa

SEQ ID NO: 509 - DNA, 42 bp, Homo Sapiens; identical to SEQ ID NO: 500
  misc_feature 27, 37, 39, 42: n = A,T,C or G

SEQ ID NO: 510 - DNA, 84 bp, Homo Sapiens
  misc_feature 76, 77, 84: n = A,T,C or G
ttttttttttttaaccccccctcccctttttttttttttttttttttttttttttttttttttttttttttttaannaaaaaan

SEQ ID NO: 511 - DNA, 201 bp, Homo Sapiens
  misc_feature 159, 161, 169, 179, 181: n = A,T,C or G
ttcccaaattaccaagaacctttatttaacctaccaaactaaaagagcaataaaataaaaatattttccatccacaaaacggttttacatcaactacactgaccaatccaaagccgaattccagcacactgggcggccgctcgtgctggctccgagcgngncaccaagnttggcgtgancntggtcatagctgttttcctg

SEQ ID NO: 512 - DNA, 90 bp, Homo Sapiens
  misc_feature 21, 26, 47, 53, 59, 85, 88, 90: n = A,T,C or G
tcagcacactggcggccgctngtacnggatccgagctcgccaccaancttggntgtaancatggtcatagctgtcttcctgacgncgntn

SEQ ID NO: 513 - DNA, 171 bp, Homo Sapiens
  misc_feature 79, 110, 119, 126, 154, 161, 164: n = A,T,C or G
tttggattggtcagtgtagttgatgtaaaaccgttttgtggatggaaaatatttttttttttttacccaaattaccaanaacctttatttaacctaccaaactaaaagancaataaaanaaaaatnttttccatccacaaaacggttttacatnaactacnccngaccaat

SEQ ID NO: 514 - DNA, 185 bp, Homo Sapiens
  misc_feature 152, 180, 184, 185: n = A,T,C or G
tttggattggtcagtgtagttgatgtaaaaccgttttgtggatggaaaatatttttattttattgctcttttagtttggtaggttaaataaaggttcttggtaatttgggtaaaaaaaaaaaaaaaaaaaaaaaaaaaaaaaaaaaaaaaangggggggggggggaaaaaaaaaaaaaancccnn

SEQ ID NO: 515 - DNA, 105 bp, Homo Sapiens
ttcccaaattaccaagaacctttatttaacctaccaaactaaaagagcaataaaataaaaaaattttccatccacaaaacggttttacatcaactacactgacca

SEQ ID NO: 516 - DNA, 116 bp, Homo Sapiens; identical to SEQ ID NO: 487

SEQ ID NO: 517 - DNA, 108 bp, Homo Sapiens
  misc_feature 104, 105, 108: n = A,T,C or G
tttacaacgaggcgacgatggtgctggtgtcctggattatgtggtacgtacctgtgggcatcatgttccttgttggaagcaagatcgtggaaaaaaaaaaaaannccn

SEQ ID NO: 518 - DNA, 457 bp, Homo Sapiens
tttacaacgaggggcggagaccacttgggaccaaagcgaggacatggaatgggagagcgcagtggatgacatgaccaaaaagttcaatgcgctcaccatctctgactccgagaagtacgcctgcggacctagctctagagccttggagcacaccaaatactcctgttgcgggcactgcagcaagccaaaacactgcggaggctggttccacagcctgccaaggtgctcaacggagcccaacctggtccgagatcgaggcggatttgagagcttgcttcagtcaagaacagttggagagcgacttcaacgaggagctgaccttggactaaggcctgaaatcacttggttctaggttgggtgcctcctggctacaagtacctgggaccagggaacagccttgaccaaggagaaccaaccaacccttctgacgccgctgccaaagagcacgacgaagcct

SEQ ID NO: 519 - DNA, 451 bp, Homo Sapiens
tttacaacgaggggcggagaccacttgggaccaaagcgaggacatggaatgggagagcgcagtggatgacatgaccaaaaagttcaatgcgctcaccatctctgactccgagaagtacgcctgcggacctagctctagagccttggagcacaccaaatactcctgttgcgggcactgcagcaagccaaaacactgcggaggctggttccacagcctgccaaggtgctcaacggagcccaacctggtccgagatcgaggcggatttgagagcttgcttcagtcaagaacagttggagagcgacttcaacgaggagctgaccttggactaaggcctgaaatcacttggttctaggttgggtgcctcctggctacaagtacctgggaccagggaacagccttgaccaaggagaaccaaccaacccttctgacgccgctgccaaagagcacgacg

SEQ ID NO: 520 - DNA, 469 bp, Homo Sapiens
tttacaacgaggggcggagaccacttgggaccaaagcgaggacatggaatgggagagcgcagtggatgacatgaccaaaaagttcaatgcgctcaccatctctgactccgagaagtacgcctgcggacctagctctagagccttggagcacaccaaatactcctgttgcgggcactgcagcaagccaaaacactgcggaggctggttccacagcctgccaaggtgctcaacggagcccaacctggtccgagatcgaggcggatttgagagcttgcttcagtcaagaacagttggagagcgacttcaacgaggagctgaccttggactaaggcctgaaatcacttggttctaggttgggtgcctcctggctacaagtacctgggaccagggaacagccttgaccaaggagaaccaaccaacccttctgacgccgctgccaaagagcacgacgaagcctacgaccaataca

SEQ ID NO: 521 - DNA, 110 bp, Homo Sapiens
  misc_feature 107, 108: n = A,T,C or G
tttacaacgaggagggggagaacagcggctgaattggaaatgataaaataaaatgaaattttaggagctcgctgtgagtatgagctgggaaaaaaaaaaaaaaaaannaa

SEQ ID NO: 522 - DNA, 131 bp, Homo Sapiens
  misc_feature 101, 107, 115, 127, 128, 131: n = A,T,C or G
tttacaacgaggagggggagaacagcggctgaattggaaatgataaaataaaatgaaattttaggagctcgctgtgagtatgagctgggaaaaaaaaaaangggggngggggggnaaaaaaaaaaannccn

SEQ ID NO: 523 - DNA, 468 bp, Homo Sapiens
tttacaacgaggggcggagaccacttgggaccaaagcgaggacatggaatgggagagcgcagtggatgacatgaccaaaaagttcaatgcgctcaccatctctgactccgagaagtacgcctgcggacctagctctagagccttggagcacaccaaatactcctgttgcgggcactgcagcaagccaaaacactgcggaggctggttccacagcccgccaaggtgcccaacggagcccaacctggtccgagatcgaggcggatttgagagcttgcttcagtcaagaacagttggagagcgacttcaacgaggagctgaccttggactaaggcctgaaatcacttggttctaggttgggtgcctcctggctacaagtacctgggaccagggaacagccttgaccaaggagaaccaaccaacccttctgacgccgctgccaaagagcacgacgaagcctacgaccaatac

SEQ ID NO: 524 - DNA, 468 bp, Homo Sapiens
tttacaacgaggggcggagaccacttgggaccaaagcgaggacatggaatgggagagcgcagtggatgacatgaccaaaaagttcaatgcgctcaccatctctgactccgagaagtacgcctgcggacctagctctagagccttggagcacaccaaatactcctgttgcgggcactgcagcaagccaaaacactgcggaggctggttccacagcctgccaaggtgctcaacggagcccaacctggtccgagatcgaggcggatttgagagcttgcttcagtcaagaacagttggagaacgacttcaacgaggagctgaccttggactaaggcctgaaatcacttggttctaggttgggtgcctcctggctacaagtacctgggaccagggaacagccttgaccaaggagaaccaaccaacccttctgacgccgctgccaaaaagcacgacgaagcctacgaccaatac

SEQ ID NO: 525 - DNA, 465 bp, Homo Sapiens
tttacaacgaggggcggagaccacttgggaccaaagcgaggacatggaatgggagagcgcagtggatgacatgaccaaaaagttcaatgcgctcaccatctctgactccgagaagtacgcctgcggacctagctctagagccttggagcacaccaaatactcctgttgcgggcactgcagcaagccaaaacactgcggaggctggttccacagcctgccaaggtgctcaacggagcccaacctggtccgagatcgaggcggatttgagagcttgcttcagtcaagaacagttggagagcgacttcaacgaggagctgaccttggactaaggcctgaaatcacttggttctaggttgggtgcctcctggctacaagtacctgggaccagggaacagccttgaccaaggagaaccaaccaacccttctgacgccgctgccaaagagcacgacgaagcctacgaccaa

SEQ ID NO: 526 - DNA, 101 bp, Homo Sapiens
tttacaacgaggcgacgatggtgctggtgtcctggattatgtggtacgtacctgtgggcatcatgttccttgttggaagcaagatcgtggaaaaaaaaaaa

SEQ ID NO: 527 - DNA, 17 bp, Homo Sapiens
tttacaacgaggagggg

SEQ ID NO: 528 - DNA, 109 bp, Homo Sapiens
  misc_feature 105, 106, 109: n = A,T,C or G
tttacaacgaggcgacgatggtgctggtgtcctggattatgtggtacgtacctgtgggcatcatgttccttgttggaagcaagatcgtggaaaaaaaaaaaaaannccn

SEQ ID NO: 529 - DNA, 55 bp, Homo Sapiens
  misc_feature 14, 16, 25, 27, 39, 46, 49, 55: n = A,T,C or G
tttttttttttttncnaaattcaangnatgggccgaagncttcgcnggncttttn

SEQ ID NO: 530 - DNA, 109 bp, Homo Sapiens
  misc_feature 103, 104, 109: n = A,T,C or G
tttacaacgaggagggggagaacagcggctgaattggaaatgataaaataaaatgaaattttaggagctcgcctgtgagtatgagctgggaaaaaaaaaaaannccgan

SEQ ID NO: 531 - DNA, 472 bp, Homo Sapiens
tttacaacgaggggcggagaccacttgggaccaaagcgaggacatggaatgggagagcgcagtggatgacatgaccaaaaagttcaatgcgctcaccatctctgactccgagaagtacgcctgcggacctagctctagagccttggagcacaccaaatactcctgttgcgggcactgcagcaagccaaaacactgcggaggctggttccacagcctgccaaggtgctcaacggagcccaacctggtccgagatcgaggcggatttgagagcttgcttcagtcaagaacagttggagagcgacttcaacgaggagctgaccttggactaaggcctgaaatcacttggttctaggttgggtgcctcctggctacaagtacctgggaccagggaacagccttgaccaaggagaaccaaccaacccttctgacgccgctgccaaagagcacgacgaagcctacgaccaatacatca

SEQ ID NO: 532 - DNA, 91 bp, Homo Sapiens
  misc_feature 25, 35, 56, 57, 89: n = A,T,C or G
aattccagcacactggcggccgctngtacaggctncgagctcgccaccaagcttgnntgtaatcatggtcatagctgtcttcctgacgncg

SEQ ID NO: 533 - DNA, 92 bp, Homo Sapiens
  misc_feature 23, 25, 33, 56, 57, 83, 89, 92: n = A,T,C or G
aattccagcacactggcggccgntnctacaggntccgagctcgccaccaagcttgnntgtaatcatggtcatagctgtcttcntgacgncgn

SEQ ID NO: 534 - DNA, 55 bp, Homo Sapiens
tttacaacgagggaatgatgtaatctaactctggctacaacgaggaaaaaaaaaa

SEQ ID NO: 535 - DNA, 19 bp, Homo Sapiens
ttacaacgagggaaaaaaa

SEQ ID NO: 536 - DNA, 43 bp, Homo Sapiens
  misc_feature 29, 31, 40, 41, 43: n = A,T,C or G
tttacaacgagggcaaagatgctaagtgntnatgtgcgtnntn

SEQ ID NO: 537 - DNA, 258 bp, Homo Sapiens
  misc_feature 181: n = A,T,C or G
tttacaacgagggcaaagatgctaaatcttgctttgcattcagtaaagtgtcaagtgattaagtgtgtatttgtaccctagatgatatgaaccagcagtcttgttttggcatcatcctcatcatgttgtattccagcttcttaagtggaaggaaaagagtgctgagaaatggctctgtatnatctatggctatccgaattctctgaaaaaataataaaagtcccctctattatatgagcctgtacagaaaaaaaaaaa

SEQ ID NO: 538 - DNA, 108 bp, Homo Sapiens
  misc_feature 102, 106, 108: n = A,T,C or G
ttacaacgaggcgacgatggtgctggtgtcctggattatgtggtacgtacctgtgggcatcatgttccttgttggaagcaagatcgtggaaaaaaaaaaaangccnan

SEQ ID NO: 539 - DNA, 271 bp, Homo Sapiens
tttacaacgaggaatacaaaatatggaaaaagaacaccccttttctttatgatttggtgatgacccatgctctggagtggcccagcctaactgcccagtggcttccagatgtaaccagaccagaagggaaagatttcagcattcatcgacttgtcctggggacacacacatcggatgaacaaaaccatcttgttatagccagtgtgcagctccctaatgatgatgctcagtttgatgcgtcacactacgacagtgagaaaggagaatttgg

SEQ ID NO: 540 - DNA, 93 bp, Homo Sapiens
  misc_feature 23, 29, 33, 44, 56, 57, 89: n = A,T,C or G
aattccagcacactggcggccgntactanaggntccgagctcgncaccaagcttgnntgtaatcatggtcatagctgtcttcctgacgncgtt

SEQ ID NO: 541 - DNA, 101 bp, Homo Sapiens; identical to SEQ ID NO: 526

SEQ ID NO: 542 - DNA, 101 bp, Homo Sapiens; identical to SEQ ID NO: 526

SEQ ID NO: 543 - DNA, 101 bp, Homo Sapiens; identical to SEQ ID NO: 526

SEQ ID NO: 544 - DNA, 98 bp, Homo Sapiens
tttacaacgaggcgacgatggtgctggtgtcctggattatgtggtacgtacctgtgggcatcatgttccttgttggaagcaagatcgtggaaaaaaaa

SEQ ID NO: 545 - DNA, 93 bp, Homo Sapiens
  misc_feature 25, 36, 46, 57, 58, 89, 92: n = A,T,C or G
aattccagcacactggcggccgctncgtacaggctncgagctcgcnaccaagcttgnntgtaatcatggtcatagctgtttcctgacgncgnt

SEQ ID NO: 546 - DNA, 303 bp, Homo Sapiens
tttacaacgaggaatacaaaatatggaaaaagaacaccccttttctttatgatttggtgatgacccatgctctggagtggcccagcctaactgcccagtggcttccagatgtaaccagaccagaagggaaagatttcagcattcatcgacttgtcctggggacacacacatcggatgaacaaaaccatcttgttatagccagtgtgcagctccctaatgatgatgctcagtttgatgcgtcacactacgacagtgagaaaggagaatttggaggttttggttcagttagtggaaaaaaaaaaa

SEQ ID NO: 547 - DNA, 37 bp, Homo Sapiens
  misc_feature 23, 25, 33, 35, 37: n = A,T,C or G
aattccagcacactggcggccgntngtacaggntncn

SEQ ID NO: 548 - DNA, 69 bp, Homo Sapiens
ttacaacgagggaatgatgtaatctaactctggttacaacgaggaatacaaaatatggaaaaaaaaaaa

SEQ ID NO: 549 - DNA, 35 bp, Homo Sapiens
  misc_feature 23, 29, 33, 35: n = A,T,C or G
aattccagcacactggcggccgntactanaggntn

SEQ ID NO: 550 - DNA, 120 bp, Homo Sapiens
tttacaacgaggaagaaagagggaagacaaagaggacaagtcagagaaagcagtgaaagattatgaacaggaaaagtcttggcaagactcagagagattaaaaggaatcttacaacgagg

SEQ ID NO: 551 - DNA, 95 bp, Homo Sapiens
tttacaacgaggcgacgatggtgctggtgtcctggattatgtggtacgtacctgtgggcatcatgttccttgttggaagcaagatcgtggaaaaa

SEQ ID NO: 552 - DNA, 100 bp, Homo Sapiens; identical to SEQ ID NO: 403

SEQ ID NO: 553 - DNA, 98 bp, Homo Sapiens; identical to SEQ ID NO: 544

SEQ ID NO: 554 - DNA, 85 bp, Homo Sapiens
tttacaacgaggagggggagaacagcggctgaattggaaatgataaaataaaatgaaattttaggagctcgctgtgagtatgagc

SEQ ID NO: 555 - DNA, 91 bp, Homo Sapiens
  misc_feature 23, 29, 56, 57, 89: n = A,T,C or G
aattccagcacactggcggccgntactanaggatccgagctcggcaccaagcttgnntgtaatcatggtcatagctgtcttcctgacgncg

SEQ ID NO: 556 - DNA, 67 bp, Homo Sapiens
  misc_feature 5, 18: n = A,T,C or G
gtttnctgagccctctanatgcatgctcgagcggccgccagtgtgatggatatctgcagaattcggc

SEQ ID NO: 557 - DNA, 23 bp, Homo Sapiens
  misc_feature 14, 19, 23: n = A,T,C or G
tttacaacgagganaaaanaggn

SEQ ID NO: 558 - DNA, 23 bp, Homo Sapiens
tccaagtggtctccgcccctcgt

SEQ ID NO: 559 - DNA, 24 bp, Homo Sapiens
  misc_feature 2, 5, 22, 23, 24: n = A,T,C or G
tnaanacaaggacacgtggcgnnn

SEQ ID NO: 560 - DNA, 101 bp, Homo Sapiens
  misc_feature 25, 35, 56, 85, 91, 95: n = A,T,C or G
aattccagcacactggcggccgttngtactggatncgagctcggtaccaagcttgncgtaatcatggtcatagctgtttcctgancccatntttnttccct

SEQ ID NO: 561 - DNA, 54 bp, Homo Sapiens
  misc_feature 6, 11, 24, 34, 36, 49, 52, 54: n = A,T,C or G
ttaatncaagnacacgtggcggcnagttactagngnatccgagcgtcancgncn

SEQ ID NO: 562 - DNA, 20 bp, Homo Sapiens
  misc_feature 6, 13, 16, 20: n = A,T,C or G
atttancaaacgnggngggn

SEQ ID NO: 563 - DNA, 170 bp, Homo Sapiens
  misc_feature 128: n = A,T,C or G
tttggattggtccagtagaaaaaagagcaaggttagggagattggaactgcaggagaggtgggaacaggttgcagtattaactgtggtgttggatgagcctcactgtggtggggaaggggatgagacntgaaaagggagtgaaccaggcagctattgggaaaaaaaaaaa

SEQ ID NO: 564 - DNA, 191 bp, Homo Sapiens
  misc_feature 98: n = A,T,C or G
tttggattggtcctccttggcagaaatttagataaggatatccttaaacagctgtttatagctactgtgacagaaacagaaaagcagtggacaacacngtttccaagaagatcaagtttgtacataacactagaggcatttcttatcaaaaggattggataataaaaataagtttctactgggaaaaaaaa

SEQ ID NO: 565 - DNA, 33 bp, Homo Sapiens
  misc_feature 13, 24, 27, 33: n = A,T,C or G
ttttttttttttncccagaaaaanctnattttn

SEQ ID NO: 566 - DNA, 167 bp, Homo Sapiens
tttggattggtcagaagatagaaaccacaaaatggagtttaatataaagaatcattaaccaagtataaagttactaactaggtaactgtaaggtaaacatattactctaaggtatcaaggaggtagcaagaagcaactgccaccactagggctacgggaaaaaaaaa

SEQ ID NO: 567 - DNA, 33 bp, Homo Sapiens; identical to SEQ ID NO: 565
  misc_feature 13, 24, 27, 33: n = A,T,C or G

SEQ ID NO: 568 - DNA, 42 bp, Homo Sapiens
  misc_feature 13, 24, 33, 37, 42: n = A,T,C or G
ttttttttttttncccgaaccccnggggggggnagtngcttn

SEQ ID NO: 569 - DNA, 35 bp, Homo Sapiens
  misc_feature 28, 31, 35: n = A,T,C or G
aattccagcacactggcggccgctcgtncangctn

SEQ ID NO: 570 - DNA, 42 bp, Homo Sapiens
  misc_feature 13, 24, 33, 37, 42: n = A,T,C or G
ttttttttttttncccgaaccccnagggggggnagtngcttn

SEQ ID NO: 571 - DNA, 48 bp, Homo Sapiens
tttggattggtcagtgtagttgatgtaaaaccgttttgtggaccaatc

SEQ ID NO: 572 - DNA, 169 bp, Homo Sapiens
tttggattggtcagaagatagaaaccacaaaatggagtttaatataaagaatcattaaccaagtataaagttactaactaggtaactgtaaggtaaacatattactctaaggtatcaaggaggtagcaagaagcaactgccaccactagggctacgggaaaaaaaaaaa

SEQ ID NO: 573 - DNA, 33 bp, Homo Sapiens; identical to SEQ ID NO: 565
  misc_feature 13, 24, 27, 33: n = A,T,C or G

SEQ ID NO: 574 - DNA, 192 bp, Homo Sapiens
tttggattggtcctccttggcagaaatttagataaggatatccttaaacagctgtttatagctactgtgacagaaacagaaaggcagtggacaacacatttcaaagaagatcaagtttgtacataacactagtggcatttcttatcaaaaggattggataataaaaataagtttctactgggaaaaaaaaaa

SEQ ID NO: 575 - DNA, 39 bp, Homo Sapiens
  misc_feature 13, 24, 33, 37, 39: n = A,T,C or G
ttttttttttttncccgaaccccnagggggggnagtngn

SEQ ID NO: 576 - DNA, 42 bp, Homo Sapiens; identical to SEQ ID NO: 568
  misc_feature 13, 24, 33, 37, 42: n = A,T,C or G

SEQ ID NO: 577 - DNA, 190 bp, Homo Sapiens
  misc_feature 113: n = A,T,C or G
tttggattggtcctgtttgctctggtgttaggagtggccttaaagaaactaggctccgaaggagaagacctcatccgtttcttcaattccctcaacgaggcgacgatggtgcntggtgtcctggattatgtggtacgtacctgtgggcatcatgttccttgttggaagcaagatcgtggaaaaaaaaaaa

SEQ ID NO: 578 - DNA, 42 bp, Homo Sapiens; identical to SEQ ID NO: 570
  misc_feature 13, 24, 33, 37, 42: n = A,T,C or G

SEQ ID NO: 579 - DNA, 39 bp, Homo Sapiens
  misc_feature 20, 24, 33, 36, 39: n = A,T,C or G
tttttttttttttcccgaancccnagggggggnagnggn

SEQ ID NO: 580 - DNA, 33 bp, Homo Sapiens; identical to SEQ ID NO: 565
  misc_feature 13, 24, 27, 33: n = A,T,C or G

SEQ ID NO: 581 - DNA, 189 bp, Homo Sapiens
tttggattggtcctgtttgctctggtattaggagtggccttaaagaaactaggctccgaaggagaagacctcatccgtttcttcaattccctcaacgaggcgacgatggtgctggtgtcctggattatgtggtacgtacctgtgggcatcatgttccttgttggaagcaagatcgtggaaaaaaaaaaa

SEQ ID NO: 582 - DNA, 197 bp, Homo Sapiens
  misc_feature 113, 193, 194, 197: n = A,T,C or G
tttggattggtcctgtttgctctggtgttaggagtggccttaaagaaactaggctccgaaggagaagacctcatccgtttcttcaattccctcaacgaggcgacgatggtgcntggtgtcctggattatgtggtacgtacctgtgggcatcatgttccttgttggaagcaagatcgtggaaaaaaaaaaaaannccn

SEQ ID NO: 583 - DNA, 253 bp, Homo Sapiens
  misc_feature 113, 222, 223, 249, 252, 253: n = A,T,C or G
tttggattggtcctgtttgctctggtgttaggagtggccttaaagaaactaggctccgaaggagaagacctcatccgtttcttcaattccctcaacgaggcgacgatggtgcntggtgtcctggattatgtggtacgtacctgtgggcatcatgttccttgttggaagcaagatcgtggaaaaaaaaaaaaaaaaaaaaaaaaaaaaaaaaaaaaaaaaaanngggggggggggaaaaaaaaaaaaaanccnn

SEQ ID NO: 584 - DNA, 170 bp, Homo Sapiens
  misc_feature 113: n = A,T,C or G
tttggattggtcctgtttgctctggtgttaggagtggccttaaagaaactaggctccgaaggagaagacctcatccgtttcttcaattccctcaacgaggcgacgatggtgcntggtgtcctggattatgtggtacgtacctgtgggcatcatgttccttgttggaagca

SEQ ID NO: 585 - DNA, 187 bp, Homo Sapiens
tttggattggtcctgtttgctctggtgttaggagtggccttaaagaaactaggctccgaaggagaagacctcatccgtttcttcaattccctcaacgaggcgacgatggtgctggtgtcctggattatgtggtacgtacctgtgggcatcatgttccttgttggaagcaagatcgtggaaaaaaaaa

SEQ ID NO: 586 - DNA, 30 bp, Homo Sapiens
  misc_feature 25, 29, 30: n = A,T,C or G
aattccagcacactggcggccgctngtann

SEQ ID NO: 587 - DNA, 99 bp, Homo Sapiens
  misc_feature 97, 98: n = A,T,C or G
tttggattggtcctgttcgctctggtgttaggaggagcctagtttctttaaggccactcctaacaccagagcagaacaggaccaatccaaagccgannc

SEQ ID NO: 588 - DNA, 264 bp, Homo Sapiens
  misc_feature 256, 257, 264: n = A,T,C or G
gccctctagatgcatgctcgagcggccgccagtgtgatggatatctgcagaattcggctttggattggtcctgtttgctctggtgttaggagtggccttaaagaaactaagctccgaaggagaagacctcatccgtttcttcaattccctcaacgaggcgacgatggtgctggtgtcctggattatgtggtacgtacctgtgggcatcatgttccttgttggaagcaagatcgtggaaaaaaaaaaaaaaaaaaanncaaaaan

SEQ ID NO: 589 - DNA, 146 bp, Homo Sapiens
  misc_feature 95: n = A,T,C or G
cgaattgggccctctagagcatgctcgagcggccgccagtgtgatggatatctgcagaattaagccgaattccagcacactggcggccgctcgtnctggatccgagctcggtaccaagcttggcgtaatcatggtcatagctgttt

SEQ ID NO: 590 - DNA, 87 bp, Homo Sapiens
  misc_feature 6, 20, 83, 84, 87: n = A,T,C or G
ggtttnctgagccctctaangcatgctcgagcggccgccagtgtgatggatatctgcagaattcggctttggattggtcctcnntgn

SEQ ID NO: 591 - DNA, 321 bp, Homo Sapiens
  misc_feature 271, 301, 308, 316, 319, 321: n = A,T,C or G
gcgaattgggccctctagagcatgctcgagcggccgccagtgtgatggatatctgcagaattcggctttggattggtcctgtttgctctggtgttaggagtggccttaaagaaactaggctccgaaggagaagacctcatccgtttcttcaattccctcaacgaggcgacgatggtgctggtgtcctggattatgtggtacgtacctgtgggcatcatgttccttgttggaagcaagatcgtggaaaaaaaaaaaaagccgaattccagcncactgggcggccgttactaggggatccganctcggtnccaagctnggngn

SEQ ID NO: 592 - DNA, 280 bp, Homo Sapiens
  misc_feature 249, 259, 272, 277, 280: n = A,T,C or G
ccctctagatgcatgctcgagcggccgccagtgtgatggatatctgcagaattcggctttggattggtcctgtttgctctggtgttaggagtggccttaaagaaactaggctccgaaggagaggacctcatccgtttcttcaattccctcaacgaggcgacgatggtgctggtgtcctggattatgtggtacgtacctgtgggcatcatgttccttgttggaagcaagatcgtggaaaaaaaaaaaaangggggggggnaaaaaaaaaaaancccanttn

SEQ ID NO: 593 - DNA, 301 bp, Homo Sapiens
  misc_feature 167: n = A,T,C or G
ccctctagatgcatgctcgagcggccgccagtgtgatggatatctgcagaattcggctttggattggtcctgtttgctctggtgttaggagtggccttaaagaaactaggctccgaaggagaagacctcatccgtttcttcaattccctcaacgaggcgacgatggngctggtgtcctggattatgtggtacgtacctgtgggcatcatgttcaagccgaattccagcacactgggccggccgttactagtggatccgagctcggtaccaagcttggcgtaatcatggtcatagctgtttt

SEQ ID NO: 594 - DNA, 300 bp, Homo Sapiens
  misc_feature 168, 268, 269, 281, 295, 299, 300: n = A,T,C or G
ctctagatgcatgctcgagcggccgccagtgtgatggatatctgcagaattcggctttggattggtcctgtttgctctggtgttaggagtggccttaaagaaactaggctccgaaggagaagacctcatccgtttcttcaattccctcaacgaggcgacgatggtgcntggtgtcctggattatgcggtacgtacctgtgggcatcatgttccttgttggaagcaagatcgtggaaaaaaaaaaaaaaaaaaaaaaaaaaaaaaaaanngggggggggggnaaaaaaaaaaaaancccnn

SEQ ID NO: 595 - DNA, 88 bp, Homo Sapiens
tagatgcatgctcgagcggccgccagtgtgatggatatctgcagaattcggcttgtttgctctggtgttaggagtggccttaaagaaa

SEQ ID NO: 596 - DNA, 83 bp, Homo Sapiens
  misc_feature 69: n = A,T,C or G
agctgtttcctggagccctctacatgcatgctcgagcggccgccagtgtgatggatatctgcagaattnggctttggattggt

SEQ ID NO: 597 - DNA, 192 bp, Homo Sapiens
  misc_feature 130, 137, 191, 192: n = A,T,C or G
ggcgaattgggccctctagatgcatgctcgagcggccgccagtgtgatggatatctgcagaattcggctttggattggtcctgtttgctctggtgttaggaagccgaattccagcacacttggcggccgntactagnggatccgagctcggtaccaagcttggcgtaatcatggtcatagctgtttcctgnn

SEQ ID NO: 598 - DNA, 146 bp, Homo Sapiens
  misc_feature 93, 97: n = A,T,C or G
gcgaattgggccctctagagcatgctcgagcggccgccagtgtgatggatatctgcagaattcggcttaattccagcacactggcggccgctngtantggatccgagctcggtaccaagcttggcgtaatcatggtcatagctgtt

SEQ ID NO: 599 - DNA, 225 bp, Homo Sapiens
  misc_feature 182, 184, 193, 206, 217, 224, 225: n = A,T,C or G
gccctctagatgcatgctcgagcggccgccagtgtgatggatatctgcagaattcggctttggattggtcagtgtagttgatgtaaaaccgttttgtggatggaaaatatttttattttattgctcttttagtttggtaggttaaataaaggttcttggtaatttgggaaaaaaaaaaaaangnggggggggnaaaaaaaaaaaancccaattcccnccccccnn

SEQ ID NO: 600 - DNA, 141 bp, Homo Sapiens
  misc_feature 91: n = A,T,C or G
gaattgggccctctagatgcatgctcgagcggccgccagtgtgatggatatctgcagaattaattccagcacactggcggccgctcgtgcnggctccgagctcggtaccaagcttggcgtaatcatggtcatagctgtttc

SEQ ID NO: 601 - DNA, 254 bp, Homo Sapiens
  misc_feature 253, 254: n = A,T,C or G
gccctctagatgcatgctcgagcggccgccagtgtgatggatatctgcagaattcggctttggattggtcctccttggcagaaatttagataaggatatccttaaacagctgtttatagctactgtgacagaaacagaaaagcagtggacaacacatttcaaagaagatcaagtttgtacataacactagaggcatttcttatcaaaaggattggataataaaaataagtttctactgggaaaaaaaaaaaann

SEQ ID NO: 602 - DNA, 315 bp, Homo Sapiens
  misc_feature 9, 307, 313, 315: n = A,T,C or G
ccctctagntgcatgctcgagcggccgccagtgtgatggatatctgcagaattcggctttggattggtcaataaggactctgtgaaaaaactgggaactggcactacagcggtattcattaataaaaacttaggcaaaaagccaggaactatcactacagtaggacttgctaagcaaagattcaggaaagaagctaggaattggtattgttccaggtttagtgcataaagagtctggcaagaagttaggacttggcactgtggttggactggttaataaagatttgggaaaaaaaaaaaaagccganttccancn

SEQ ID NO: 603 - DNA, 348 bp, Homo Sapiens
  misc_feature 16, 314, 320: n = A,T,C or G
aattgggccctctagntgcatgctcgagcggccgccagtgtgatggatatctgcagaattcggctttggattggtcaataaggactctgtgaaaaaactgggaactggcactacagcggtattcattaataaaaacttaggcaaaaagccaggaactatcactacagtaggacttgctaagcaaagattcaggaaagaagctaggaattggtattgttccaggtttagtgcataaagagtctggcaagaagttaggacttggcactgtggttggactggttaataaagatttgggaaaaaaaaaaaaagccganttccancccctgggcggccgttactaggggatcc

SEQ ID NO: 604 - DNA, 95 bp, Homo Sapiens
  misc_feature 6, 89, 93, 95: n = A,T,C or G
ctctanatgcatgctcgagcggccgccagtgtgatggatatctgcagaattccagcacactggcggccgctcgagcatgcatctagagngccnan

SEQ ID NO: 605 - DNA, 144 bp, Homo Sapiens
tagggcgaattgggccctctagatgcatgctcgagcggccgccagtgtgatggatatctgcagaattcggctcagcacactggcggccgttactagtggatccgagctcggtaccaagcttggcgtaatcatggtcatagctgt

SEQ ID NO: 606 - DNA, 331 bp, Homo Sapiens
  misc_feature 309, 315, 321: n = A,T,C or G
aattgggccctctagctgcatgctcgagcggccgccagtgtgatggatatctgcagaattcggctttggattggtcaataaggactctgtgaaaaaactgggaactggcactacagcggtattcattaataaaaacttaggcaaaaagccaggaactatcactacagtaggacctgctaagcaaagattcaggaaagaagctaggaattggtattgttccaggtttagtgcataaagagtctggcaagaagttaggacttggcactgtggttggactggttaataaagatttgggaaaaaaaaaaaaangggggngggggnaaaaaaaaaa

SEQ ID NO: 607 - DNA, 345 bp, Homo Sapiens
  misc_feature 169, 309, 317, 325: n = A,T,C or G
gccctctagcatgcatgctcgagcggccgccagtgtgatggatatctgcagaattcggctttggattggtcaataaggactctgtgaaaaaactgggaactggcactacagcggtattcattaataaaaacttaggcaaaaagccaggaactatcactacagtaggacntgctaagcaaagattcaggaaagaagctaggaattggtattgttccaggtttagtgcataaagagtctggcaagaagttaggacttggcactgtggttggactggttaataaagatttgggaaaaaaaaaaaaagccganttccagcncctggggngggccgttactaggggatcc

SEQ ID NO: 608 - DNA, 312 bp, Homo Sapiens
  misc_feature 302, 308: n = A,T,C or G
gccctctagatgcatgctcgagcggccgccagtgtgatggatatctgcagaattcggctttggattggtcaataaggactctgtgaaaaaactgggaactggcactacagcggtattcattaataaaaacttaggcaaaaagccaggaactatcactacagtaggacttgctaagcaaagattcaggaaagaagctaggaattggtattgttccaggtttagtgcataaagagtctggcaagaagttaggacttggcactgtggttggactggttaataaagatttgggaaaaaaaaaaaangccganttcc

SEQ ID NO: 609 - DNA, 331 bp, Homo Sapiens
  misc_feature 253, 259, 270, 297, 303, 312, 317: n = A,T,C or G
gccctctagatgcatgctcgagcggccgccagtgtgatggatatctgcagaattcggctttggattggtcctccttggcagaaatttagataaggatatccttaaacagctgtttatagctactgtgacagaaacagaaaagcagtggacaacacatttcaaagaagatcaagtttgtacataacactagtggcatttcttatcaaaaggattggataataaaaataagtttctactgggaaaaaaaaaaaangccganttccagcccantggggggccgttactaggggatccganctcggncccaagctnggcgnaatcatggccatag

SEQ ID NO: 610 - DNA, 112 bp, Homo Sapiens
  misc_feature 73, 84, 87, 98, 103, 109, 112: n = A,T,C or G
tgggccctctagagcatgctcgagcggccgccagtgtgatggatatctgcagaattcggcttttttttttttncccagaaaaanctnattttaattanccaancctttngan

SEQ ID NO: 611 - DNA, 312 bp, Homo Sapiens; identical to SEQ ID NO: 608
  misc_feature 302, 308: n = A,T,C or G

SEQ ID NO: 612 - DNA, 296 bp, Homo Sapiens
  misc_feature 9, 294: n = A,T,C or G
ccctctagntgcatgctcgagcggccgccagtgtgatggatatctgcagaattcggattggtcaataaggactctgtgaaaaaactgggaactggcaccacagcggtattcattaataaaaacttaggcaaaaagccaggaactatcactacagtaggactgctaagcaaagattcaggaaagaagctaggaattggtattgttccaggtttagtgcataaagagtctggcaagaagttaggacttggcactgtggttggactggttaataaagatttgggaaaaaaaaaaaangc

SEQ ID NO: 613 - DNA, 89 bp, Homo Sapiens
  misc_feature 69, 80, 83, 89: n = A,T,C or G
ccctctagagcatgctcgagcggccgccagtgtgatggatatctgcagaattcggcttttttttttttncccagaaaaanctnattttn

SEQ ID NO: 614 - DNA, 326 bp, Homo Sapiens
  misc_feature 169, 304, 310, 316: n = A,T,C or G
ccctctagcatgcatgctcgagcggccgccagtgtgatggatatctgcagaattcggctttggattggtcaataaggactctgtgaaaaaactgggaactggcactacagcggtattcattaataaaaacttaggcaaaaagccaggaactatcacctacagtaggacntgctaagcaaagattcaggaaagaagctaggaattggtattgttccaggtttagtgcataaagagtctggcaagaagttaggacttggcactgtggttggactggttaataaagatttgggaaaaaaaaaaaaangggggngggggnaaaaaaaaaa

SEQ ID NO: 615 - DNA, 269 bp, Homo Sapiens
  misc_feature 259, 265: n = A,T,C or G
aattgggccctctagctgcatgctcgagcggccgccagtgtgatggatatctgcagaattcggctttggattggtcctccttggcagaaatttagataaggatatccttaaacagctgtttatagctactgtgacagaaacagaaaagcagtggacaacacatttcaaagaagatcaagtttgtacataacactagaggcatttcttatcaaaaggattggataataaaaataagtttctactgggaaaaaaaaaaaangccganttcc

SEQ ID NO: 616 - DNA, 375 bp, Homo Sapiens
  misc_feature 314, 320, 329, 330, 352, 359, 367, 372, 375: n = A,T,C or G
aattgggccctctagctgcatgctcgagcggccgccagtgtgatggatatctgcagaattcggctttggattggtcaataaggactctgtgaaaaaactgggaactggcactacagcggtattcattaataaaaacttaggcaaaaagccaggaactatcactacagtaggacttgctaagcaaagattcaggaaagaagctaggaattggtattgttccaggtttagtgcataaagagtctggcaagaagttaggacttggcactgtggttggactggttaataaagatttgggaaaaaaaaaaaaagccganttccancccctgggnnggccgttactaggggatccganctcgganccaagctnggcgnaan

SEQ ID NO: 617 - DNA, 305 bp, Homo Sapiens
  misc_feature 301, 302, 305: n = A,T,C or G
ccctctagctgcatgctcgagcggccgccagtgtgatggatatctgcagaattcggctttggattggtcaataaggactctgtgaaaaaactgggaactggcactacagcggtattcattaataaaaacttaggcaaaaagccaggaactatcactacagtaggacctgctaagcaaagattcaggaaagaagctaggaattggtattgttccaggtttagtgcataaagagtctggcaagaagttaggacttggcactgtggttggactggttaataaagatttgggaaaaaaaaaaaannccn

SEQ ID NO: 618 - DNA, 313 bp, Homo Sapiens
  misc_feature 303, 309: n = A,T,C or G
gccctctagatgcatgctcgagcggccgccagtgtgatggatatctgcagaattcggctttggattggtcaataaggactctgtgaaaaaactgggaactggcactacagcggtattcattaataaaaacttaggcaaaaagccaggaactatcacctacagtaggactgctaagcaaagattcaggaaagaagctaggaattggtattgttccaggtttagtgcataaagagtctggcaagaagttaggacttggcactgtggttggactggttaataaagatttgggaaaaaaaaaaaaangccganttcc

SEQ ID NO: 619 - DNA, 343 bp, Homo Sapiens
  misc_feature 308, 314, 324: n = A,T,C or G
gccctctagatgcatgctcgagcggccgccagtgtgatggatatctgcagaattcggctttggattggtcaataaggactctgtgaaaaaactgggaactggcactacagcggtattcattaataaaaacttaggcaaaaagccaggaactatcactacagtaggacttgctaagcaaagattcaggaaagaagctaggaattggtattgttccaggtttagtgcataaagagtctggcaagaagttaggacttggcactgtggttggactggttaataaagatttgggaaaaaaaaaaaaagccganttccancccctgggcnggccgttactaggggatcc

SEQ ID NO: 620 - DNA, 304 bp, Homo Sapiens
  misc_feature 302, 303: n = A,T,C or G
gccctctagatgcatgctcgagcggccgccagtgtgatggatatctgcagaattcggctttggattggtcaataaggactctgtgaaaaaactgggaactggcactacagcggtattcattaataaaaacttaggcaaaaagccaggaactatcacctacagtaggactgctaagcaaagattcaggaaagaagctaggaattggtattgttccaggtttagtgcataaagagtctggcaagaagttaggacttggcactgtggttggactggttaataaagatttgggaaaaaaaaaaaannc

SEQ ID NO: 621 - DNA, 362 bp, Homo Sapiens
  misc_feature 308, 314, 318, 333, 353, 354, 362: n = A,T,C or G
gccctctagatgcatgctcgagcggccgccagtgtgatggatatctgcagaattcggctttggattggtcaataaggactctgtgaaaaaactgggaactggcactacagcggtattcattaataaaaacttaggcaaaaagccaggaactatcacctacagtaggactgctaagcaaagattcaggaaagaagctaggaattggtattgttccaggtttagtgcataaagagtctggcaagaagttaggacttggcactgtggttggactggttaataaagatttgggaaaaaaaaaaaaagccganttccancccnctgggcgggccgttnctaggggatccgagctcggnnccaagctn

SEQ ID NO: 622 - DNA, 239 bp, Homo Sapiens
tttggattggtcaataaggactctgtgaaaaaactgggaactggcactacagcggtattcattaataaaaacttaggcaaaaagccaggaactatcacctacagtaggactacctaagcaaagattcaggaaagaagctaggaattggtattgtcccaggtttagtgcataaagagtctggcaagaagttaggacttggcactgtggttggactggttaataaagatttggggaaaaaa

SEQ ID NO: 623 - DNA, 197 bp, Homo Sapiens
  misc_feature 191, 195, 197: n = A,T,C or G
tttggattggtcctgtttgctctggtgttaggagtggccttaaagaaactaggctccgaaggagaagacctcatccgtttcttcaattccctcaacgaggcgacgatggtgctggtgtcctggattatgtggtacgtacctgtgggcatcatgttccttgttggaagcaagatcgtggaaaaaaaaaaaangccnan

SEQ ID NO: 624 - DNA, 33 bp, Homo Sapiens; identical to SEQ ID NO: 244
  misc_feature 25, 30, 33: n = A,T,C or G

SEQ ID NO: 625 - DNA, 33 bp, Homo Sapiens; identical to SEQ ID NO: 244
  misc_feature 25, 30, 33: n = A,T,C or G

SEQ ID NO: 626 - DNA, 246 bp, Homo Sapiens
  misc_feature 90, 202, 203, 228, 233, 239, 245, 246: n = A,T,C or G
tttggattggtcctgtttgctctggtgttaggagtggccttaaagaaactaggctccgaaggagaagacctcatccgtttcttcaattcnctcaacgaggcgacgatggtgctggtgtcctggattatgtggtacgtacctgtgggcatcatgttccttgttggaagcaagatcgtggaaaaaaaaaaaaaaaaaaaaaaanngggggggggggaaaaaaaaaaaaancccanttcccncccccnn

SEQ ID NO: 627 - DNA, 30 bp, Homo Sapiens
  misc_feature 23, 25, 30: n = A,T,C or G
aattccagcacactggcggccgntngtacn

SEQ ID NO: 628 - DNA, 187 bp, Homo Sapiens; identical to SEQ ID NO: 585

SEQ ID NO: 629 - DNA, 239 bp, Homo Sapiens
  misc_feature 207, 234, 237, 239: n = A,T,C or G
tttggattggtcctgtttgctctggtgttaggagtggccttaaagaaactaggctccgaaggagaagacctcatccgtttcttcaattccctcaacgaggcgacgatggtgctggtgtcctggattatgtggtacgtacctgtgggcatcatgttccttgttggaagcaagatcgtggaaaaaaaaaaaaaaaaaaaaaaaaaaaangggggggggggggaaaaaaaaaaaaanccnan

SEQ ID NO: 630 - DNA, 113 bp, Homo Sapiens
  misc_feature 105, 110, 113: n = A,T,C or G
tttggattggtcatcgtagggttcaaccagaggcctggcttatttggattggtcagggtggtgggaaaaaaaaaaaaaaaaggggggggggaaaaaaaaaaaaancccanttn

SEQ ID NO: 631 - DNA, 41 bp, Homo Sapiens
  misc_feature 33, 35, 41: n = A,T,C or G
aattccagcacactggcggccgctcgtgcaggntncgagcn

SEQ ID NO: 632 - DNA, 148 bp, Homo Sapiens
tttggattggtctacttacctagctgattatgggcagccagtttctaagtaccttcgggtgaattcaaacacagcccttactcttttggagaagatgaaggatactagcaaaaagaacaatatatttgctcagttcaggaaaaaaaaa

SEQ ID NO: 633 - DNA, 258 bp, Homo Sapiens
  misc_feature 113, 229, 234, 246, 254, 256, 258: n = A,T,C or G
tttggattggtcctgtttgctctggtgttaggagtggccttaaagaaactaggctccgaaggagaagacctcatccgtttcttcaattccctcaacgaggcgacgatggtgcntggtgtcctggattatgtggtacgtacctgtgggcatcatgttccttgttggaagcaagatcgtggaaaaaaaaaaaaaaaaaaaaaaaaggggggggggggaaaaaaaaaaaaancccanttcccccccccngggggggngntn

SEQ ID NO: 634 - DNA, 189 bp, Homo Sapiens
tttggattggtcctgtttgctctggtgttaggagtggccttaaagaaactaggctccgaaggagaagacctcatccgtttcttcaattccctcaacgaggcgacgatggtgctggtgtcctggattatgtggtacgtacctgtgggcatcatgttccttgttggaagcaagatcgtggaaaaaaaaaaa

SEQ ID NO: 635 - DNA, 57 bp, Homo Sapiens
  misc_feature 14, 38, 44, 51, 56, 57: n = A,T,C or G
tttggattggtccntcctattataggtagtgaagagangcctanattaatntatcnn

SEQ ID NO: 636 - DNA, 189 bp, Homo Sapiens; identical to SEQ ID NO: 634

SEQ ID NO: 637 - DNA, 190 bp, Homo Sapiens
  misc_feature 113: n = A,T,C or G
tttggattggtcctgtttgctctggtgttaggagtggccttaaagaaactaggctccgaaggagaagacctcatccgtttcttcaattccctcaacgaggcgacgatggtgcntggtgtcctggattatgtggtacgtacctgtgggcatcatgttccttgttggaagcaagatcgtggaaaaaagaaaa

SEQ ID NO: 638 - DNA, 40 bp, Homo Sapiens
  misc_feature 35, 37, 40: n = A,T,C or G
aattccagcacactggcggccgctcgtgcatgctncnagn

SEQ ID NO: 639 - DNA, 190 bp, Homo Sapiens; identical to SEQ ID NO: 577
  misc_feature 113: n = A,T,C or G

SEQ ID NO: 640 - DNA, 177 bp, Homo Sapiens
  misc_feature 127, 128, 145, 158, 162, 169, 176, 177: n = A,T,C or G
tttggattggtcagtgtagttgatgtaaaaccgttttgtggatggaaaatatttttattttattgctcttttagtttggtaggttaaataaaggttcttggtaatttggaaaaaaaaaaaaaaaaannaaaaaaagggggggggnaaaaaaaaaaaancccnattcccnccccccnn

SEQ ID NO: 641 - DNA, 121 bp, Homo Sapiens
  misc_feature 103: n = A,T,C or G
tttggattggtcagtgtagttgatgtaaaaccgttttgtggatggaaaatatttttattttattgctcttttagtttggtaggttaaataaaggttcttggtnatttgggaaaaaaaaaaa

SEQ ID NO: 642 - DNA, 121 bp, Homo Sapiens
tttggattggtcagtgtagttgatgtaaaaccgttttgtggatggaaaatatttttattttattgctcttttagtttggtaggttaaataaaggttcttggtaatttgggaaaaaaaaaaa

SEQ ID NO: 643 - DNA, 127 bp, Homo Sapiens
tttggattggtcagtgtagttgatgtaaaaccgttttgtggatggaaaatatttttattttattgcccttttagtttggtaggttaaataaaggttcttggtaatttgggaaacagctatgaccaat

SEQ ID NO: 644 - DNA, 93 bp, Homo Sapiens
tttggattggtcagggaaaaactaaaagagcaataaaataaaaatattttccatccacaaaacggttttacatcaactacactgaccaatcca

SEQ ID NO: 645 - DNA, 93 bp, Homo Sapiens; identical to SEQ ID NO: 644

SEQ ID NO: 646 - DNA, 161 bp, Homo Sapiens
  misc_feature 125, 155, 157, 161: n = A,T,C or G
tttggattggtcagtgtagttgatgtaaaaccgttttgtggatggaaaatatttttattttattgctcttttagtttggtaggttaaataaaggttcttggtaatttgggaaaaaaaaaaaaaangggggggggggaaaaaaaaaaaaaccccantncccn

SEQ ID NO: 647 - DNA, 166 bp, Homo Sapiens
  misc_feature 137, 159, 164, 166: n = A,T,C or G
tttggattggtcagtgtagttgatgtaaaaccgttttgtggatggaaaatatttttattttattgctcttttagtttggtaggttaaataaaggttcttggtaatttgggaaaaaaaaaaaaaaaaaaaaaaaaaangggggggggaaaaaaaaaaaancccantn

SEQ ID NO: 648 - DNA, 54 bp, Homo Sapiens
  misc_feature 13, 49: n = A,T,C or G
ttttttttttttncccccccccccctttttttttttttttttttttttncccaa

SEQ ID NO: 649 - DNA, 125 bp, Homo Sapiens
  misc_feature 119, 120, 125: n = A,T,C or G
attggtcagtgtagttgatgtaaaaccgttttgtggatggaaaatatttttattttattgctcttttagtttggtaggttaaataaaggttcttggtaatttgggaaaaaaaaaaaaannccgan

SEQ ID NO: 650 - DNA, 169 bp, Homo Sapiens
  misc_feature 136, 148, 166, 167, 169: n = A,T,C or G
attggtcagtgtagttgatgtaaaaccgttttgtggatggaaaatatttttattttattgctcttttagtttggtaggttaaataaaggttcttggtaatttgggaaaaaaaaaaaaaaaaaaaaaaaaaaaaaangggggggggggnaaaaaaaaaaaaaccccnntn

SEQ ID NO: 651 - DNA, 121 bp, Homo Sapiens; identical to SEQ ID NO: 641
  misc_feature 103: n = A,T,C or G

SEQ ID NO: 652 - DNA, 186 bp, Homo Sapiens
  misc_feature 124, 129, 135, 139, 154, 157, 178, 181, 186: n = A,T,C or G
tttggattggtcagtgtagttgatgtaaaaccgttttgtggatggaaaatatttttattttattgctcttttagtttggtaggttaaataaaggttcttggtaatttgggaaaaaaaaaaaaanccganttccancccnctggcggccgcccgngcnggctccgagctcggccccaanctnggcgn

SEQ ID NO: 653 - DNA, 35 bp, Homo Sapiens; identical to SEQ ID NO: 190
  misc_feature 30, 31, 35: n = A,T,C or G

SEQ ID NO: 654 - DNA, 60 bp, Homo Sapiens
  misc_feature 13, 58, 59, 60: n = A,T,C or G
ttttttttttttnccccccccccccctttttttttttttttttttttttcccaaaaannn

SEQ ID NO: 655 - DNA, 74 bp, Homo Sapiens
  misc_feature 13, 55, 70: n = A,T,C or G
ttttttttttttnccccccccccctttttttttttttttttttttttttttcccnaaaaaaaaaaaaacntttt

SEQ ID NO: 656 - DNA, 121 bp, Homo Sapiens; identical to SEQ ID NO: 642

SEQ ID NO: 657 - DNA, 79 bp, Homo Sapiens
  misc_feature 13, 20, 71, 77, 79: n = A,T,C or G
ttttttttttttnccccccnccccttttttttttttttttttttttttttttttttttttcccaaaaaaanaaaaancn

SEQ ID NO: 658 - DNA, 54 bp, Homo Sapiens
  misc_feature 45, 51: n = A,T,C or G
ttctttctaccccaccctccgtaaaaaaaaaaaaaaaaagagagngggggngat

SEQ ID NO: 659 - DNA, 130 bp, Homo Sapiens
  misc_feature 72, 128, 129, 130: n = A,T,C or G
ttggggctaaaaaacttgcatagagcaatttttttttttttttttttttttttttttttttttttttttttncccccccccccctttttttttttttttttttttttttttttttaaaaaaaaaaaannn

SEQ ID NO: 660 - DNA, 25 bp, Homo Sapiens
ttctttctacccgtaaaaaaaaaaa

SEQ ID NO: 661 - DNA, 107 bp, Homo Sapiens
tttggaagttaaagtatttattgatgtgtttaaactgtgtacattctccacagatcatattaaggagtttgtaggtgaagtttaatctgtgcatagtgggtagaaag

SEQ ID NO: 662 - DNA, 31 bp, Homo Sapiens
  misc_feature 11, 17, 22, 27, 31: n = A,T,C or G
tagactgtttnctgganccctnaaacnatgn

SEQ ID NO: 663 - DNA, 37 bp, Homo Sapiens; identical to SEQ ID NO: 36
  misc_feature 32, 33, 37: n = A,T,C or G

SEQ ID NO: 664 - DNA, 25 bp, Homo Sapiens
ttctttctacccgtaaaaaaaaaaa

SEQ ID NO: 665 - DNA, 50 bp, Homo Sapiens
  misc_feature 7, 22, 35, 41, 48, 50: n = A,T,C or G
ctgtttnctggagccctctacngcatgctcaaagnggccgncagaganan

SEQ ID NO: 666 - DNA, 35 bp, Homo Sapiens; identical to SEQ ID NO: 190
  misc_feature 30, 31, 35: n = A,T,C or G

SEQ ID NO: 667 - DNA, 182 bp, Homo Sapiens
  misc_feature 7, 9, 75, 82, 101, 129, 130, 145, 149, 164, 167, 181: n = A,T,C or G
actgttnanttgggccctctacatgcatgctcgagcggccgccagtgtgatggatatctgcagaattcggctttnttttagnccagtgaagtgtgatgtanaaccgttttgtaggatggaaaatatttnnattattattgctctnttanttgggcatggataanaangggagtcttgtatna

SEQ ID NO: 668 - DNA, 38 bp, Homo Sapiens
  misc_feature 19, 31, 35, 38: n = A,T,C or G
agctgtttactgagccctntacagcatgctngagnggn

SEQ ID NO: 669 - DNA, 21 bp, Homo Sapiens
ttctttctaccccgaaaaaaa

SEQ ID NO: 670 - DNA, 188 bp, Homo Sapiens
ttctttctaccccactgaccggacggagatatttacgagaaaaagaagcagtcattactcctgttgcatcagccacccaaagtgtgagccggttacagagtattgtggctggtctgaaaaatgcaccaagtgaccaacttataaatatttttgaatcttgtgtgcgtaatcctgtggaaaaaaaaaaa

SEQ ID NO: 671 - DNA, 26 bp, Homo Sapiens
ttctttctaccctggaaaaaaaaaaa

SEQ ID NO: 672 - DNA, 30 bp, Homo Sapiens
ttctttctaccccccctggaaaaaaaaaaa

SEQ ID NO: 673 - DNA, 31 bp, Homo Sapiens
tagggcgaattgggccctctagcatgcatgc

SEQ ID NO: 674 - DNA, 71 bp, Homo Sapiens
ttctttctaccccatccctcacagcctcttgctgctaaaatagatgtttcatttttctggaaaaaaaaaaa

SEQ ID NO: 675 - DNA, 35 bp, Homo Sapiens; identical to SEQ ID NO: 190
  misc_feature 30, 31, 35: n = A,T,C or G

SEQ ID NO: 676 - DNA, 259 bp, Homo Sapiens
  misc_feature 221, 227, 233, 237, 253, 254, 259: n = A,T,C or G
ttctttctaccccctgaacaataaataggatgaggttttactgtaattgggtaaagtttactcttggacattatttcgatgctaaagtaaggattctgtggatgttaccttaaagagaaaagcataagagcatgaagcatatctgggaatatcttttgcctttaagacgattcattcttgtctagagggaaaatctggctgatttgggaaaaaaaaaaaangccganttccancccnctgggcggccgttcgnncgggn

SEQ ID NO: 677 - DNA, 35 bp, Homo Sapiens; identical to SEQ ID NO: 190
  misc_feature 30, 31, 35: n = A,T,C or G

SEQ ID NO: 678 - DNA, 39 bp, Homo Sapiens
  misc_feature 18, 25, 37, 38, 39: n = A,T,C or G
acactggcggccgctcgngcatgcntctagagggccnnn

SEQ ID NO: 679 - DNA, 123 bp, Homo Sapiens
ttagaacactacataattggaaataaggtttaaccttcagtagagccctgaggatgttcaatttaaaatgtttttaaaaaaagattaaaagaagaaattagagatatatgccagggtagaaag

SEQ ID NO: 680 - DNA, 70 bp, Homo Sapiens
ttctttctaccccatccctcacagcctcttgctgctaaaatagatgtttcatttttcggaaaaaaaaaaa

SEQ ID NO: 681 - DNA, 64 bp, Homo Sapiens
ttctttctaccccggaaaaaaaagattaaaagaagaaattagagatatatgccagggtagaaag

SEQ ID NO: 682 - DNA, 178 bp, Homo Sapiens
ttctttctaccctggcatatatctctaatttcttcttttaatctttttttaaaaacattttaaattgaacatcctcagggctctactgaaggttaaaccttatttccaattatgtagtgttcttaaggtaccacagtcatgatactttttaaatttatattagtgtatggaaaaaaaa

SEQ ID NO: 683 - DNA, 63 bp, Homo Sapiens
ttctttctaccctggcatatatctctaatttcttcttttaatctttttttccggggtagaaag

SEQ ID NO: 684 - DNA, 23 bp, Homo Sapiens
ttctttctaccccggaaaaaaaa

SEQ ID NO: 685 - DNA, 182 bp, Homo Sapiens
ttctttctaccctggcatatatctctaatttcttcttttaatctttttttaaaaacattttaaattgaacatcctcagggcctctactgaaggttaaaccttatttccaattatgtagtgttcttaaggtaccacagtcatgatactttttaaatttatattagtgtatggaaaaaaaaaaa

SEQ ID NO: 686 - DNA, 182 bp, Homo Sapiens; identical to SEQ ID NO: 685

SEQ ID NO: 687 - DNA, 32 bp, Homo Sapiens
  misc_feature 24, 27, 32: n = A,T,C or G
tccagcacactggcggccgctcgngcntgctn

SEQ ID NO: 688 - DNA, 181 bp, Homo Sapiens
ttctttctaccctggcatatatctctaatttcttcttttaatctttttttaaaaacattttaaattgaacatcctcagggctctactgaaggttaaaccttatttccaattatgtagtgttcttaaggtaccacagtcatgatactttttaaatttatattagtgtatggaaaaaaaaaaa

SEQ ID NO: 689 - DNA, 33 bp, Homo Sapiens
  misc_feature 7: n = A,T,C or G
gggcganttgggccctctagatgcatgctcgag

SEQ ID NO: 690 - DNA, 178 bp, Homo Sapiens; identical to SEQ ID NO: 682

SEQ ID NO: 691 - DNA, 48 bp, Homo Sapiens
  misc_feature 34, 42, 47, 48: n = A,T,C or G
aattccagcacactggcggccgctcgagcatgcntctagagngcccnn

SEQ ID NO: 692 - DNA, 182 bp, Homo Sapiens; identical to SEQ ID NO: 685

SEQ ID NO: 693 - DNA, 181 bp, Homo Sapiens; identical to SEQ ID NO: 688

SEQ ID NO: 694 - DNA, 107 bp, Homo Sapiens
ttattggaaataaggtttaaccttcagtagagccctgaggatgttcaatttaaaatgtttttagaaaaagattaaaagaagaaattagagatatatgccagggtaga

SEQ ID NO: 695 - DNA, 177 bp, Homo Sapiens
ttctttctaccctggcatatatctctaatttcttcttttaatctttttttaaaaacattttaaattgaacatcctcagggctctactgaaggttaaaccttatttccaattatgtagtgttcttaaggtaccacagtcatgatactttttaaatttatattagtgtatggaaaaaaa

SEQ ID NO: 696 - DNA, 137 bp, Homo Sapiens
  misc_feature 39, 78, 87, 114, 117, 131, 136, 137: n = A,T,C or G
gttttggggctatccatgcatgctcgagcggccgccagngtgatggatatctgcagaattcggctttttttttttttnccccgtggncgggggttcccctttggcccggggggngcnggtttcccgggccncggcnn

SEQ ID NO: 697 - DNA, 107 bp, Homo Sapiens; identical to SEQ ID NO: 694

SEQ ID NO: 698 - DNA, 181 bp, Homo Sapiens; identical to SEQ ID NO: 688

SEQ ID NO: 699 - DNA, 288 bp, Homo Sapiens
  misc_feature 1, 22, 164, 242, 275, 281, 286, 288: n = A,T,C or G
nacactaagggcgatttgggcnctctaactgcatgctcgagcggccgccagtgtgatggatatctgcagaattcggcttctttctaccctggcatatatctctaatttcttcttttaatctttttttaaaaacattttaaattgaacatcctcagggctctacntgaaggttaaaccttatttccaattatgtagtgttcttaaggtaccacagtcatgatactttttaaatttatattagnatatggaaaaaaaaaaaattccagcacactggnggccgntcgtngn

SEQ ID NO: 700 - DNA, 178 bp, Homo Sapiens; identical to SEQ ID NO: 682

SEQ ID NO: 701 - DNA, 50 bp, Homo Sapiens
  misc_feature 27, 47, 49, 50: n = A,T,C or G
aattccagcacactggcggccgctcgngcatgcatctagagggcccncnn

SEQ ID NO: 702 - DNA, 38 bp, Homo Sapiens
ttccccttccttcccggccgctgatcttggagccaaaa

SEQ ID NO: 703 - DNA, 131 bp, Homo Sapiens
  misc_feature 1, 11, 22: n = A,T,C or G
ntacagggcgnttgggccctcnacagcatgctcgagcggccgccagtgtgatggatatctgcagaattcggcttattcaatgtgtacccaggcttccccttccttcccggccgctgatcttggagccaaaa

SEQ ID NO: 704 - DNA, 160 bp, Homo Sapiens
  misc_feature 2, 7, 23, 32, 89, 101, 104, 111, 147, 153, 157, 160: n = A,T,C or G
gnccctncacggacgttttgggncctcaaccntgcatgctcgagcggccgccagtgtgatggatatctgcagaattcggcttccccttnctttccggtcgntgntcttggngcctttttagccgatttccagctccctggcggcgtncccttncttncgn

SEQ ID NO: 705 - DNA, 38 bp, Homo Sapiens; identical to SEQ ID NO: 702

SEQ ID NO: 706 - DNA, 58 bp, Homo Sapiens
ttaaattcaatgtgtacccaggcttccccttccttcccggccgctgatcttggagcca

SEQ ID NO: 707 - DNA, 40 bp, Homo Sapiens
  misc_feature 27, 34, 37, 40: n = A,T,C or G
aattccagcacactggcggccgctcgngcatgcntcnagn

SEQ ID NO: 708 - DNA, 83 bp, Homo Sapiens
  misc_feature 21, 55, 64: n = A,T,C or G
agcacactggcggccgctcgngcatgcatctagagggcccaattcgccctatagngagtcgtantacaatgtcactggccgtc

SEQ ID NO: 709 - DNA, 38 bp, Homo Sapiens; identical to SEQ ID NO: 702

SEQ ID NO: 710 - DNA, 24 bp, Homo Sapiens
ttgccgctgatcttggagccaaaa

SEQ ID NO: 711 - DNA, 50 bp, Homo Sapiens
  misc_feature 27, 34, 47, 49, 50: n = A,T,C or G
aattccagcacactggcggccgctcgngcatgcntctagagggcccncnn

SEQ ID NO: 712 - DNA, 49 bp, Homo Sapiens
  misc_feature 27, 34, 47, 48, 49: n = A,T,C or G
aattccagcacactggcggccgctcgngcatgcntctagagggcccnnn

SEQ ID NO: 713 - DNA, 68 bp, Homo Sapiens
ttatgtcatccactgcgctctcccattccatgtcctcgctttggtcccaagtggtctccgcccctcgt

SEQ ID NO: 714 - DNA, 135 bp, Homo Sapiens
  misc_feature 22, 29, 32, 46, 56, 69, 131, 132, 135: n = A,T,C or G
tcagtgtgatggatatcggtgnagaattnggnttacaacgaggggntggagaccanttgggacaaaagnagaggacatggaatgggagagcgcagtggatgacatgatcaaaaaaaaaaaaagcgcgaatnnaan

SEQ ID NO: 715 - DNA, 86 bp, Homo Sapiens
ttacaacgaggggcggagaccacttgggaccaaagcgaggacatggaatgggagagcgcagtggatgacatgaccaaaaaaaaaaa

SEQ ID NO: 716 - DNA, 41 bp, Homo Sapiens
tttacaacgaggggcggagaccacttgggaccaaagcgagg

SEQ ID NO: 717 - DNA, 52 bp, Homo Sapiens
  misc_feature 19, 44, 50, 52: n = A,T,C or G
tttacaacgaggggcgganaccacttgccagcacactggcggcngctatngn

SEQ ID NO: 718 - DNA, 37 bp, Homo Sapiens
ttcctcgctttggtcccaagtggtctccgcccctcgt

SEQ ID NO: 719 - DNA, 121 bp, Homo Sapiens
  misc_feature 118, 119, 121: n = A,T,C or G
ttacaacgaggggcggagaccacttgggaccaaagcgaggacatggaatgggagagcgcagtggatgacatgaccaaaaaaaaaaaaagccgatttccagcacattggggggccgttnntn

SEQ ID NO: 720 - DNA, 45 bp, Homo Sapiens
  misc_feature 40, 44, 45: n = A,T,C or G
aattccagcacactggcggccgctcgtgcatgcttctagntcgnn

SEQ ID NO: 721 - DNA, 86 bp, Homo Sapiens
ttttttggctcccaacttaactagaggattttattcctaccacaggtctgtatcttttaaggtttgtttcttggtaaaaaaaaaaa

SEQ ID NO: 722 - DNA, 40 bp, Homo Sapiens
  misc_feature 4, 33, 39, 40: n = A,T,C or G
ttanttccagcacactggcggccgctcgtgctngctccnn

SEQ ID NO: 723 - DNA, 70 bp, Homo Sapiens
  misc_feature 24, 26, 36, 50, 56, 65, 68, 70: n = A,T,C or G
tttttttttttttacagcaatacnangaaaagcaanactctagttatgangctaancccaagggnccngn

SEQ ID NO: 724 - DNA, 83 bp, Homo Sapiens
ttttttggctcccaacttaactagaggattttattcctaccacaggtctgtatcttttaaggtttgtttcttggtaaaaaaaa

SEQ ID NO: 725 - DNA, 42 bp, Homo Sapiens
  misc_feature 36, 42: n = A,T,C or G
ttaattccagcacactggcggccgctcgtgctggcncctagn

SEQ ID NO: 726 - DNA, 55 bp, Homo Sapiens
  misc_feature 17, 26, 31, 41, 47, 53, 55: n = A,T,C or G
ttttttttttttttacncaaccttanccccnaattaggacnccttgnttaatnan

SEQ ID NO: 727 - DNA, 84 bp, Homo Sapiens
ttttttggctccattggaaagcaggacacttgggtttagcatcataactagagtattgctttacatcatattgctgtaaaaaaa

SEQ ID NO: 728 - DNA, 86 bp, Homo Sapiens
ttttttggctcccatgaccatattaggctaacgggttaattagacaaggtgtcctaatttggggctaaggttgtgtaaaaaaaaaa

SEQ ID NO: 729 - DNA, 48 bp, Homo Sapiens
  misc_feature 16, 25, 40, 46, 48: n = A,T,C or G
tttttttttttttacncaaccttanccccaaattaggacnccttgncn

SEQ ID NO: 730 - DNA, 58 bp, Homo Sapiens
  misc_feature 25, 40, 52: n = A,T,C or G
tttttttttttttacacaaccttanccccaaattaggacnccttgtctaatnaacccg

SEQ ID NO: 731 - DNA, 88 bp, Homo Sapiens
ttttttttcttttacagcaatatgatgtaaagcaatactctagttatgatgctaaacccaagtgtcctgctttccaatggagccaaaa

SEQ ID NO: 732 - DNA, 88 bp, Homo Sapiens
  misc_feature 21, 26, 36, 50, 56, 65, 68, 78, 82: n = A,T,C or G
tttttttttttttacagcaanatgangaaaagcaanactctagttatgangctaancccaagggnccngctttccaangganccaaaa

SEQ ID NO: 733 - DNA, 39 bp, Homo Sapiens
  misc_feature 26, 31, 36, 39: n = A,T,C or G
aattccagcacactggcggccgctangtacnggatnctn

SEQ ID NO: 734 - DNA, 84 bp, Homo Sapiens
ttttttggctcccagcctgtaaatatgtatagacctgttttgtcatttttttaataaagtcagttctggtggtaaaaaaaaaaa

SEQ ID NO: 735 - DNA, 61 bp, Homo Sapiens
  misc_feature 13, 24, 33, 40, 46, 54, 56, 61: n = A,T,C or G
ttttttttttttnacctatgctcnggaaaaacnggcatcngggcancctacttnanagttn

SEQ ID NO: 736 - DNA, 144 bp, Homo Sapiens
  misc_feature 96, 114, 122, 139, 142, 144: n = A,T,C or G
ttttttggctcctcaaagtagaactatgaagtaggctgcacagatgccagtattaccagagcataggtaaaaaaaaaaaaagccctaattccagcncactggcgggccgctcgngctggctncgggggggcccccaacnccngn

SEQ ID NO: 737 - DNA, 117 bp, Homo Sapiens
  misc_feature 74, 79, 85, 89, 111, 115, 117: n = A,T,C or G
ttttttggctcctgaaaacatgaatataaaagatgaggaagctatatttataaccttggtaaaaaaaaaaaaanccganttccancccnctggcggccgttcctgcgggcnccgngn

SEQ ID NO: 738 - DNA, 36 bp, Homo Sapiens
  misc_feature 30, 34: n = A,T,C or G
aattccagcacactggcggccgctcgtgcnggcncc

SEQ ID NO: 739 - DNA, 38 bp, Homo Sapiens
ttctgtaatcaattgtgctgacaacacaggagccaaaa

SEQ ID NO: 740 - DNA, 249 bp, Homo Sapiens
  misc_feature 245, 246, 249: n = A,T,C or G
ttttttggctcctggggagatatatctgccttctaagaaggcaggccaggtcttgggcacagacctgcatttgttgaccttgcactccaactatagtgccttgcaagtgctcaacagtacatattggaatgaagtccctatgagagccatttctggccatgttctatacctcaaagtgaggctggcaggtacagagatgaactgtgcacatgtgatacatttaagccactggaaaaaaaaaaaannccn

SEQ ID NO: 741 - DNA, 245 bp, Homo Sapiens
ttttttggctcctaacagatgcccactgtgatctcctcacctctcctcgttctcacagagggaaactaaacttagcaattcagttttgggggaagagaccagggaaaggagtggaggataaactaaaggacaaaggtcagtttcaaaaagctgttctgccagatcttgctcagaaaactattcaggtatccaaagactgagaataaaaggagatagatgaaattagtccagtggaaaaaaaaaaa

SEQ ID NO: 742 - DNA, 300 bp, Homo Sapiens
ttttttggctccttcagaaacaggaagataagtgggcccctcagatttttcatatatctttggggataaagttggttatatctggtttattttagggattttgcttctgtagttacccaagatcaaatagccaactcagaaatactcagttggatatcaatcaaatagtgcctaccaggggagtaaacagacaacttttaggtttttagtttttgcttttgtgtggagttgagtccaatttttaaggcaactattgttgacctttctctaggcggtagcatttaggatgggaaaaaaaaa

SEQ ID NO: 743 - DNA, 308 bp, Homo Sapiens
  misc_feature 304, 305, 308: n = A,T,C or G
ttttttggctccttcagaaacaggaagataagtgggcccctcagatttttcatatatctttggggataaagttggttatatctggtttattttagggattttgcttctgtagttacccaagatcaaatagccaactcagaaatactcagttggatatcaatcaaatagtgcctaccaggggagtaaacagacaacttttaggtttttagtttttgcttttgtgtggagttgagtccaatttttaaggcaactattgttgacctttctctaggcggtagcatttaggatgggaaaaaaaaaaaannccn

SEQ ID NO: 744 - DNA, 310 bp, Homo Sapiens
  misc_feature 304, 308, 310: n = A,T,C or G
ttttttggctccttcagaaacaggaagataagtgggcccctcagatttttcatatatctttggggataaagttggttatatctggtttattttagggattttgcttctgtagttacccaagatcaaatagccaactcagaaatactcagttggatatcaatcaaatagtgcctaccaggggagtaaacagacaacttttaggtttttagtttttgcttttgtgtggagttgagtccaatttttaaggcaactattgttgacctttctctaggcggtagcatttaggatgggaaaaaaaaaaaangccnan

SEQ ID NO: 745 - DNA, 246 bp, Homo Sapiens
ttttttggctcctaacagatgcccactgtgatctcctcacctctcctcgttctcacagagggaaactaaacttagcaattcagttttgggggaagagaccagggaaaggagtggaggataaacctaaaggacaaaggtcagtttcaaaaagctgttctgccagatcttgctcagaaaactattcaggtatccaaagactgagaataaaaggagatagatgaaattagtccagtggaaaaaaaaaaa

SEQ ID NO: 746 - DNA, 32 bp, Homo Sapiens
tacttatcttcctgtttctgaaggagccaaaa

SEQ ID NO: 747 - DNA, 302 bp, Homo Sapiens
ttttttggctccttcagaaactggaagataagtgggcccctcagatttttcatatatctttggggataaagttggttatatctggtttattttagggattttgcttctgtagttacccaagatcaaatagccaactctgaaatactcagttggatatcaatcaaatagtgcctaccaggggagtaaacagacaacttttaggtttttagtttttgcttttgtgtggagttgagtccaatttttaaggcaactattgttgacctttctctaggcggtagcatttaggatgggaaaaaaaaaaa

SEQ ID NO: 748 - DNA, 311 bp, Homo Sapiens
  misc_feature 305, 306, 311: n = A,T,C or G
ttttttggctccttcagaaacaggaagataagtgggcccctcagatttttcatatatctttggggataaagttggttatatctggtttattttagggattttgcttctgtagttacccaagatcaaatagccaacctcagaaatactcagttggatatcaatcaaatagtgcctaccaggggagtaaacagacaacttttaggtttttagtttttgcttttgtgtggagttgagtccaatttttaaggcaactattgttgacctttctctaggcggtagcatttaggatgggaaaaaaaaaaaannccgan

SEQ ID NO: 749 - DNA, 57 bp, Homo Sapiens
  misc_feature 49: n = A,T,C or G
agagaaggaaagagagctttgtttttttttttttaccaattaatctgcncttaggaa

SEQ ID NO: 750 - DNA, 65 bp, Homo Sapiens
tttacctaagcgctcaataaatgtcagcggtcattgtgattagaaacctctgctctgctgacctc

SEQ ID NO: 751 - DNA, 39 bp, Homo Sapiens
  misc_feature 33, 36, 39: n = A,T,C or G
ttaattccagcacactggcggccgctcgagcangcntcn

SEQ ID NO: 752 - DNA, 103 bp, Homo Sapiens
  misc_feature 88, 95, 101, 103: n = A,T,C or G
gatttgggccctctacatgcatgctcgagcggccgccagtgtgatggatatctgcagaattaattccagcacactggcggccgctcgngcatgcntctagngn

SEQ ID NO: 753 - DNA, 53 bp, Homo Sapiens
  misc_feature 39, 48, 50, 53: n = A,T,C or G
cgaattccagcacactggcggccgctcgagcatgcatcnagagggccnanaan

SEQ ID NO: 754 - DNA, 68 bp, Homo Sapiens
ttaccaagaggtcagcagagcagaggtttctaatcacaatgaccgctgacatttattgagcgcttagg

SEQ ID NO: 755 - DNA, 24 bp, Homo Sapiens
ttaggtacaccatcatcgcttagg

SEQ ID NO: 756 - DNA, 62 bp, Homo Sapiens
tttacctaagcgatgatggtgtaacatctagctgttgctgcaccatcatcgcttaggtaaac

SEQ ID NO: 757 - DNA, 89 bp, Homo Sapiens
  misc_feature 32, 40, 46, 51, 60, 64, 73, 75, 84, 87, 89: n = A,T,C or G
tgcagaattaattccagcacactggcggccgntcgagcangcatcnagagngccacaacntttngcgtatttntngtcccaccncgnan

SEQ ID NO: 758 - DNA, 59 bp, Homo Sapiens
  misc_feature 2, 7: n = A,T,C or G
tnttacntaagcgatgatggtgcagcaacagctagatgttacacccgaaaaaaaaaaaa

SEQ ID NO: 759 - DNA, 56 bp, Homo Sapiens
tttacctaagcgatgatggtgcagcaacagctagatgttacaccgaaaaaaaaaaa

SEQ ID NO: 760 - DNA, 185 bp, Homo Sapiens
tttacctaagcgatgatggtgcagcaacagctagatgttacaccgaaagaaaatggatttgcaggaaaagaatacactaagttaatgtctaagataatggggaaaatagaaaataacattattaagtgtaaaaccagcaaagtacttttttaattaaacaaagttcgagtttcgaaaaaaaaaaa

SEQ ID NO: 761 - DNA, 84 bp, Homo Sapiens
  misc_feature 55, 64, 78: n = A,T,C or G
agcacactggcggccgctcgagcatgcatctagagggcccaattcgccctatagngagtcgtantacaatgtcacctngccgtc

SEQ ID NO: 762 - DNA, 37 bp, Homo Sapiens
  misc_feature 28, 35, 37: n = A,T,C or G
aattccagcacactggcggccgctcgtncaggctncn

SEQ ID NO: 763 - DNA, 57 bp, Homo Sapiens
tttacctaagcgatgatggtgcagcaacagctagatgttacaccgaaaaaaaaaaaa

SEQ ID NO: 764 - DNA, 52 bp, Homo Sapiens
tttacctaagcgatgatggtgcagcaacagctagatgttacaccgaaaaaaa

SEQ ID NO: 765 - DNA, 38 bp, Homo Sapiens
tagggcgaattgggccctctagatgcatgctcgagcgg

SEQ ID NO: 766 - DNA, 32 bp, Homo Sapiens
tttacctaagcgatgatggtgcagcaacagct

SEQ ID NO: 767 - DNA, 173 bp, Homo Sapiens
  misc_feature 162, 165, 172, 173: n = A,T,C or G
tttacctaagcgatgatggtgcagcaacagctagatgttacaccatcatcgcttaggtaaagccgaattctgcagatatccatcacactggcggccgctcgagcatgcatctagagggcccaattcgccctatagtgagtcgtattacaattcactggccgncgntttacann

SEQ ID NO: 768 - DNA, 90 bp, Homo Sapiens
  misc_feature 23, 60, 69, 84, 89, 90: n = A,T,C or G
actgtttactggggccctctacngcatgctcgagcggccgccagtgtgatggatatctgnagaattcgnctttttttttttttnccggnn

SEQ ID NO: 769 - DNA, 53 bp, Homo Sapiens
tttacctaagcgacgatggtgcagcaacagctagatgttacaccgaaaaaaaa

SEQ ID NO: 770 - DNA, 30 bp, Homo Sapiens
  misc_feature 17, 26, 29, 30: n = A,T,C or G
tttttttttttttaacnaataaatcngcnn

SEQ ID NO: 771 - DNA, 27 bp, Homo Sapiens
  misc_feature 21, 25, 27: n = A,T,C or G
aattccagcacactggcggcnggtngn

SEQ ID NO: 772 - DNA, 42 bp, Homo Sapiens
  misc_feature 29, 33, 39, 42: n = A,T,C or G
ttaattccagcacactggcggccgctcgngcangcttcnagn

SEQ ID NO: 773 - DNA, 40 bp, Homo Sapiens
  misc_feature 13, 18, 35, 39, 40: n = A,T,C or G
ttttttttttttncccgntaaggaaaagccaaatnccann

SEQ ID NO: 774 - DNA, 148 bp, Homo Sapiens
  misc_feature 120, 146, 147, 148: n = A,T,C or G
tttacctaagcgggaaaaaaaaaatttttttcccgcttaggtaaagccgaattctgcagatatccatcacactggcggccgctcgagcatgcatctagagggcccaattcgccctatagngagtcgtattacaattcactggccgnnn

SEQ ID NO: 775 - DNA, 27 bp, Homo Sapiens
ttaggtattttttttttcccgcttagg

SEQ ID NO: 776 - DNA, 36 bp, Homo Sapiens
  misc_feature 29, 33, 36: n = A,T,C or G
ttaattccagcacactggcggccgctcgngcangcn

SEQ ID NO: 777 - DNA, 90 bp, Homo Sapiens
  misc_feature 34, 38, 44, 48, 88, 89, 90: n = A,T,C or G
ttaattccagcacacctggcggccgctcgtgcangctncgagcncgcnaccaagcttggcgtaatcatggtcatagctgtttcctgannn

SEQ ID NO: 778 - DNA, 41 bp, Homo Sapiens
  misc_feature 28, 35, 38, 41: n = A,T,C or G
aattccagcacacctggcggccgctcgngcatgcntcnagn

SEQ ID NO: 779 - DNA, 80 bp, Homo Sapiens
  misc_feature 9, 75: n = A,T,C or G
agctgtttnctggagccctctacatgcatgctcgagcggccgccagtgtgatggatatctgcagaattcggcttnttttt

SEQ ID NO: 780 - DNA, 37 bp, Homo Sapiens
  misc_feature 13, 16, 24, 30, 35, 37: n = A,T,C or G
ttttttttttttnccntgaaaaanggcagnaaggncn

SEQ ID NO: 781 - DNA, 40 bp, Homo Sapiens
  misc_feature 13, 21, 25, 33, 37, 40: n = A,T,C or G
ttttttttttttncccaaaantttnatgggggnaaanctn

SEQ ID NO: 782 - DNA, 37 bp, Homo Sapiens
  misc_feature 13, 21, 28, 33, 37: n = A,T,C or G
ttttttttttttncccaaaanttttatnggggnaaan

SEQ ID NO: 783 - DNA, 142 bp, Homo Sapiens
ttctgcttgatggtgactctgcaggagactctgaagtgactgctgggaaaccctttgggagacctgacctggggccaaaaataaagtgagccagcgtcatgaacgcatgctatttagggacacacctggatggtaaaaaaaa

SEQ ID NO: 784 - DNA, 138 bp, Homo Sapiens
ttctgcttgatggtgactctgcaggagactctgaagtgactgctgggaaaccctttgggagtcctgacctggggccaaaaataaagtgagccagcgtcatgaacgcatgctatttggtcaccattacccatcaagcag

SEQ ID NO: 785 - DNA, 141 bp, Homo Sapiens
ttctgcttgatggtgactctgtaggagactctgaagtgactgctgggaaaccctttgggagacctgacctggggccaaaaataaagtgagccagcgtcatgaacgcatgctatttagggacacacctggtaaaaaaaaaaa

SEQ ID NO: 786 - DNA, 158 bp, Homo Sapiens
  misc_feature 34, 120, 136, 139: n = A,T,C or G
tttttttttttaccagggacaaacttttattcanaaaataaaagtattatttcattttattattcccaaagaatcaagcccatcatgagtagcccacatggttgctgttcaaaggtaccngaaaagggaggcattnggncaccattacccatcaagca

SEQ ID NO: 787 - DNA, 39 bp, Homo Sapiens
ttctgcttgatggcaaaataattatggtaaaaaaaaaaa

SEQ ID NO: 788 - DNA, 141 bp, Homo Sapiens
ttctgcttgatggtgactctgcaggagactctgaagtgactgctgggaaaccctttgggagacctgacctggggccaaaaataaagtgagccagcgtcatgaacgcatgctatttagggacacacctggtcccacatcaag

SEQ ID NO: 789 - DNA, 31 bp, Homo Sapiens
ttctgcttgatggtgactctgcaggagactc

SEQ ID NO: 790 - DNA, 134 bp, Homo Sapiens
  misc_feature 24, 31, 43, 54, 57, 66, 73, 88, 95, 100, 107, 125, 128, 134: n = A,T,C or G
tttttttttttttacccagccaangccattnattatacatgtnaaacagcttcnaanaccgacggnctcccanaaaaaggtttggggnatttttngtttngtttttnattttttttttaaccatnaancaaaan

SEQ ID NO: 791 - DNA, 171 bp, Homo Sapiens
ttagtgacaaacttttattcagaaaataaaagtattatttcattttattattcccaaagaatcaagcccaccatgagtagcccacatggttgctgttcaaaggtacttgaaaagggaggcatttggtcaccattacccatcaagcagacatcaaccaaactagacatcaag

SEQ ID NO: 792 - DNA, 161 bp, Homo Sapiens
ttctgcttgatgacatagggaaccctaaagaataggacctagcatgaagggcctaggcctccccaccagaaataccttcaatgggatctcttctttgggcagagaaggccttccagtttgaggtttccagtctgcccatctcctctgggtaaaaaaaaaaa

SEQ ID NO: 793 - DNA, 145 bp, Homo Sapiens
ttacccagaggagatgggcagactggaaacctcaaactggaaggccttctctgcccaaagaagagatcccattgaaggtatttctggtggggaggcctaggcccttcatgctaggtcctattctttagggttccctatgtcatca

SEQ ID NO: 794 - DNA, 127 bp, Homo Sapiens
  misc_feature 41, 73, 80, 94, 101, 118, 122, 127: n = A,T,C or G
tttttttttttttaccagggacaaacttttattcaaaaaanaaaagtattatttcattttattattcccaaanaatcaancccatcatgagtancccacanggttgctgttcaaaggnaccngaaan

SEQ ID NO: 795 - DNA, 159 bp, Homo Sapiens
ttctgcttgatgacatagggaaccctaaagaataggacctagcatgaagggcctaggcctccccaccagaaataccttcaatgggatctcttctttgggcagagaaggccttccagtttgaggtttccagtctgcccatctcctctgggtaaaaaaaaa

SEQ ID NO: 796 - DNA, 141 bp, Homo Sapiens
ttctgcttgatggtgactctgcaggagactctgaagtgactgctgggaaaccctttgggagacctgacctggggccaaaaataaagtaagccagcgtcatgaacgcatgctatttagggacacacctggtaaaaaaaaaaa

SEQ ID NO: 797 - DNA, 51 bp, Homo Sapiens
  misc_feature 34, 46, 47, 51: n = A,T,C or G
aattccagcacactggcggccgctcgagcatgcntctagagggccnncaan

SEQ ID NO: 798 - DNA, 158 bp, Homo Sapiens
ttctgcttgatgacatagggaaccctaaagaataggacctagcatgaagggcctaggcctccccaccagaaataccttcaatgggatctcttctttgggcagagaaggccttccagtttgaggtttccagtctgcccatctcctctgggtaaaaaaaa

SEQ ID NO: 799 - DNA, 119 bp, Homo Sapiens
  misc_feature 116: n = A,T,C or G
ttctgcttgatggcttgagcagtgttcagatcacagcatacatattcaaatgattttaatatttggaaagactgtcagagggttgtgtccgtgtaaaaaaaaaaaaaaaaaacctngca

SEQ ID NO: 800 - DNA, 40 bp, Homo Sapiens
  misc_feature 31, 37, 40: n = A,T,C or G
aattccagcacactggcggccgctcgtgcangcttcnagn

SEQ ID NO: 801 - DNA, 103 bp, Homo Sapiens
ttctgcttgatggcttgagcagtgttcagatcacagcatacatattcaaatgattttaatatttggaaagactgtcagagggttgtgtccgtgtaaaaaaaaa

SEQ ID NO: 802 - DNA, 85 bp, Homo Sapiens
  misc_feature 18, 36, 45, 80: n = A,T,C or G
tttttttttttttaccanacctcctaggcgacccanacaattatnccctagccaaccccttaaacacccctccccacatnaagca

SEQ ID NO: 803 - DNA, 102 bp, Homo Sapiens
ttctgcttgatggcttgagcagtgttcagatcacagcatacatattcaaatgattttaatatttggaaagactgtcagagggttgtgtccgtgtaaaaaaaa

SEQ ID NO: 804 - DNA, 105 bp, Homo Sapiens
ttctgcttgatggcttgagcagtgttcagatcacagcatacatattcaaatgattttaatatttggaaagactgtcagagggttgtgtccgtgtaaaaaaaaaaa

SEQ ID NO: 805 - DNA, 139 bp, Homo Sapiens
  misc_feature 110, 116, 122, 135, 136, 139: n = A,T,C or G
ttctgcttgatggcttgagcagtgttcagatcacagcatacatattcaaatgattttaatatttggaaagactgtcagagggttgtgtccgtgtaaaaaaaaaaaaaaangggggngggggnaaaaaaaaaaaannccn

SEQ ID NO: 806 - DNA, 29 bp, Homo Sapiens
ttctgcttgatggcttgagcagtgttcag

SEQ ID NO: 807 - DNA, 89 bp, Homo Sapiens
ttacggacacaaccctctgacagtctttccaaatattaaaatcatttgaatatgtatgctgtgatctgaacactgctcaagccatcaag

SEQ ID NO: 808 - DNA, 102 bp, Homo Sapiens
tttttctttttttacacggacacaaccctctgacagtctttccaaatattaaaatcatttgaatatgtatgctgtgatctgaacactgctcaagccatcaag

SEQ ID NO: 809 - DNA, 186 bp, Homo Sapiens
  misc_feature 183: n = A,T,C or G
gggcgaattgggccctctagctgcatgctcgagcggccgccagtgtgatggatatctgcagaattcggcttctgcttgatggcttgagcagtgttcagatcacagcatacatattcaaatgattttaatatttggaaagactgtcagagggttgtgtccgtgtaaaaaaaaaaaaaagccganttc

SEQ ID NO: 810 - DNA, 264 bp, Homo Sapiens
  misc_feature 192, 194, 212, 213, 229, 242, 251: n = A,T,C or G
tagggcgaattgggccctctagatgcatgctcgagcggccgccagtgtgatggatatctgcagaattcggcttctgcttgatggcttgagcagtgttcagatcacagcatacatattcaaatgattttaatatttggaaagactgtcagagggttgtgtccgtgtaaaaaaaaaaaaagccgaattccagcncnctgggcggccgttcctannggatccgagctcggtnccaagcttggcgnaatcatggncatagctgttttc

SEQ ID NO: 811 - DNA, 206 bp, Homo Sapiens
gggcgaattgggccctctagcatgcatgctcgagcggccgccagtgtgatggatatctgcagaattcggcttcatcaagcagatataattttattagtattcacagttcatcaagcagaagccgaattccagcacacttggcggccgctcgtgctggatccgagctcggtaccaagcttggcgtaatcatggtcatagctgttttc

SEQ ID NO: 812 - DNA, 184 bp, Homo Sapiens
  misc_feature 107, 137: n = A,T,C or G
gggcgaattgggccctctagatgcatgctcgagcggccgccagtgtgatggatatctgcagaattcggcttctgcttgatggcttgagcagtgttcagatcaagccnaattccagcacactggcggccgctcgtacnggatccgagctcggtaccaagcttggcgtaatcatggtcatagctgt

SEQ ID NO: 813 - DNA, 96 bp, Homo Sapiens
  misc_feature 96: n = A,T,C or G
gggcgaattgggccctctagatgcatgctcgagcggccgccagtgtgatggatatctgcagaattaagccgaattccagcacactggcggccgctn

SEQ ID NO: 814 - DNA, 247 bp, Homo Sapiens
  misc_feature 176, 178, 192, 197, 212, 213, 226: n = A,T,C or G
ctctagctgcatgctcgagcggccgccagtgtgatggatatctgcagaattcggcttctgcttgatggcttgagcagtgttcagatcacagcatacatattcaaatgattttaatatttggaaagactgtcagagggttgtgtccgtgtaaaaaaaaaaaaagccgaattccagcncnctgggcggccgttnctagnggatccgagctcggnnccaagcttggcgnaatcatggccatagctgtttt

SEQ ID NO: 815 - DNA, 103 bp, Homo Sapiens
  misc_feature 103: n = A,T,C or G
agggcgaattgggccctctagatgcatgctcgagcggccgccagtgtgatggatatctgcagaattaagccgaattccagcacactggcggccgctcgtgcan

SEQ ID NO: 816 - DNA, 118 bp, Homo Sapiens
  misc_feature 113: n = A,T,C or G
ctctagatgcatgctcgagcggccgccagtgtgatggatatctgcagaattcggcttctgcttgatgggtaatggtgaccaaatgccatcaagcagaagccgaattccagccncactc

SEQ ID NO: 817 - DNA, 104 bp, Homo Sapiens
  misc_feature 95, 98, 104: n = A,T,C or G
ctctagatgcatgctcgagcggccgccagtgtgatggatatctgcagaattaagccgaattccagcacacctggcggccgctcgtgcatgcttcnagngggccn

SEQ ID NO: 818 - DNA, 136 bp, Homo Sapiens
  misc_feature 111, 134: n = A,T,C or G
ctctagcatgcatgctcgagcggccgccagtgtgatggatatctgcagaattcggcttctgcttgatgacaataaagctcgttgactcagcgaaaaaaaaaaaaagccganttccagcacacttggcgggccgntc

SEQ ID NO: 819 - DNA, 121 bp, Homo Sapiens
  misc_feature 108, 113, 119, 121: n = A,T,C or G
ctctagctgcatgctcgagcggccgccagtgtgatggatatctgcagaattcggcttctgcttgatgacaataaagctcgttgactcagcgaaaaaaaaaaaaaaaangcganttccancn

SEQ ID NO: 820 - DNA, 121 bp, Homo Sapiens
  misc_feature 101, 114, 120, 121: n = A,T,C or G
tagggcgaattgggccctctagatgcatgctcgagcggccgccagtgtgatggatatctgcagaattaattccagcacactggcggccgctcgagcatgcntctagagggcccncaacgnn

SEQ ID NO: 821 - DNA, 152 bp, Homo Sapiens
  misc_feature 102, 103, 114, 116: n = A,T,C or G
agggcgaattgggccctctagatgcatgctcgagcggccgccagtgtgatggatatctgcagaattaagccgaattccagcacactggcggccgctcgtgcnngcttcgagctngntaccaagcttggcgtaatcatggtcatagctgtttc

SEQ ID NO: 822 - DNA, 199 bp, Homo Sapiens
  misc_feature 161, 178, 183, 190, 198, 199: n = A,T,C or G
gggcgaattgggccctctagcatgcatgctcgagcggccgccagtgtgatggatatctgcagaattcggcttctgcttgatgcctgtatcaagtgggatatgtccgcagaaaatgctaggtgcaaagtttgtcgaaaaaaaaaaaaagccgacttccagcncacttggcgggccgttnctagnggatccnagctcggnn

SEQ ID NO: 823 - DNA, 90 bp, Homo Sapiens
  misc_feature 78: n = A,T,C or G
ctctagatgcatgctcgagcggccgccagtgtgatggatatctgcaagccgaattccagcacactggcggccgctcgngcatgcatctag

SEQ ID NO: 824 - DNA, 99 bp, Homo Sapiens
  misc_feature 82, 87, 92, 98, 99: n = A,T,C or G
ctctagatgcatgctcgagcggccgccagtgtgatggatatctgcagaattcggcttaattccagcacactggcggccgctngtacnggctncgagcnn

SEQ ID NO: 825 - DNA, 82 bp, Homo Sapiens
  misc_feature 82: n = A,T,C or G
tactgctgatttgggccctctacatgcatgctcgagcggccgccagtgtgatggatatctgcagaattcggcttttttttan

SEQ ID NO: 826 - DNA, 166 bp, Homo Sapiens
  misc_feature 105, 110, 164, 165, 166: n = A,T,C or G
tagggcgaattgggccctctagcatgcatgctcgagcggccgccagtgtgatggatatctgcagaattcggcttaagccgaattccagcacactggcggccgctngtacnggatccgagctcggtaccaagcttggcgtaatcatggtcatagctgtttcctgnnn

SEQ ID NO: 827 - DNA, 161 bp, Homo Sapiens
  misc_feature 119, 127, 142, 152, 157, 161: n = A,T,C or G
agggcgaattgggccctctagctgcatgctcgagcggccgccagtgtgatggatatctgcagaattcggcttgatgacaataaagctcgttgactcagcgaaaaaaaaaaaaagccganttccagcncacttggcgggccgntcgtgctggntccgngctn

SEQ ID NO: 828 - DNA, 154 bp, Homo Sapiens
  misc_feature 101, 114, 120, 125, 131: n = A,T,C or G
tagggcgaattgggccctctagcatgcatgctcgagcggccgccagtgtgatggatatctgcagaattaagccgaattccagcacactggcggccgctcgngcatgcttctagngggccnccaancttggngtaatcatggtcatagctgtttc

SEQ ID NO: 829 - DNA, 107 bp, Homo Sapiens
  misc_feature 93, 103, 106, 107: n = A,T,C or G
agggcgaattgggccctctagatgcatgctcgagcggccgccagtgtgatggatatctgcagaattaattccagcacactggcggccgctcgngcatgcttcnagnn

SEQ ID NO: 830 - DNA, 229 bp, Homo Sapiens
  misc_feature 209, 214, 221, 225: n = A,T,C or G
agggcgaattgggccctctagctgcatgctcgagcggccgccagtgtgatggatatctgcagaattcggcttctgcttgatgtggggaggggtgtttaaggggttggctagggtataattgtctgggtcgcctaggaggtctggtgagaatagtgttaatgtcatcaagcagaagccgaattccagcacacttggcggccgctcgtgcntgctncctagcncgcngggg

SEQ ID NO: 831 - DNA, 181 bp, Homo Sapiens
gcgaattgggccctctagatgcatgctcgagcggccgccagtgtgatggatatctgcagaattcggcttctgcttgatggtgagatggttcccttattccttcaggaaaggcttagcattgggctgcttgatgacaataaaatatctgatattctgcgaaaaaaaaaaaaagccgaattcc

SEQ ID NO: 832 - DNA, 259 bp, Homo Sapiens
  misc_feature 204, 208: n = A,T,C or G
ctctagctgcatgctcgagcggccgccagtgtgatggatatctgcagaattcggcttctgcttgatgtggggaggggtgtttaaggggttggctagggtataattgtctgggtcgcctaggaggtctggtgagaatagtgttaatgtcattaaggagagaaggaagagaagtaagccgaattccagcacacttggcggccgctnctantggatccgagctcggtaccaagcttggcgtaatcatggtcatagctgtttt

SEQ ID NO: 833 - DNA, 96 bp, Homo Sapiens
  misc_feature 70, 74, 92, 94, 96: n = A,T,C or G
ctctagcagcatgctcgagcggccgccagtgtgatggatatctgcagaattcggcttttttttttttttngggnagccaaaacattaaaaancngn

SEQ ID NO: 834 - DNA, 180 bp, Homo Sapiens
  misc_feature 170, 176: n = A,T,C or G
agggcgaattgggccctctagctgcatgctcgagcggccgccagtgtgatggatatctgcagaattcggcttctgcttgatgactatggttaataataatatattgtagacttgaaatctgctaggaaagcagatcttaaatgttctgactacaccgaaaaaaaaaaaangccganttcc

SEQ ID NO: 835 - DNA, 95 bp, Homo Sapiens
  misc_feature 79, 81, 91, 93, 95: n = A,T,C or G
ctctagatgcatgctcgagcggccgccagtgtgatggatatctgcagaattcggctttttttttttttcgggaagccanancattaaaaancngn

SEQ ID NO: 836 - DNA, 95 bp, Homo Sapiens
  misc_feature 69, 79, 81, 91, 93, 95: n = A,T,C or G
ctctagatgcatgctcgagcggccgccagtgtgatggatatctgcagaattcggctttttttttttttngggaagccanancattaaaaancngn

SEQ ID NO: 837 - DNA, 199 bp, Homo Sapiens
  misc_feature 168, 174, 182, 184, 197: n = A,T,C or G
gggcgaattgggccctctagctgcatgctcgagcggccgccagtgtgatggatatctgcagaattcggcttctgcttgatgactatggttaataataatatattgtagacttgaaatctgctaggaaagcagatcttaaatgttctgactacacgaaaaaaaaaaaangccganttccagcncnctgggcgggccgntc

SEQ ID NO: 838 - DNA, 186 bp, Homo Sapiens
  misc_feature 175, 181, 185, 186: n = A,T,C or G
agggcgaattgggccctctagctgcatgctcgagcggccgccagtgtgatggatatctgcagaattcggcttctgcttgatgactatggttaataataatatattgtagacttgaaatctgctaggaaagcagatcttaaatgttctgactacacgaaaaaaaaaaaaagccganttccancccnn

SEQ ID NO: 839 - DNA, 182 bp, Homo Sapiens
  misc_feature 168, 174, 180, 182: n = A,T,C or G
gggcgaattgggccctctagctgcatgctcgagcggccgccagtgtgatggatatctgcagaattcggcttctgcttgatgactatggttaataataatatattgtagacttgaaatctgctaggaaagcagatcttaaatgttctgactacacgaaaaaaaaaaaangccganttccancn

SEQ ID NO: 840 - DNA, 104 bp, Homo Sapiens
gggcgaattgggccctctagatgcatgctcgagcggccgccagtgtgatggatatctgcagaattcggcttttttttttttttcgggaagccaaaacattaaaa

SEQ ID NO: 841 - DNA, 183 bp, Homo Sapiens
  misc_feature 169, 175, 181, 183: n = A,T,C or G
gggcgaattgggccctctagcatgcatgctcgagcggccgccagtgtgatggatatctgcagaattcggcttctgcttgatgactatggttaataataatatattgtagacttgaaatctgctaggaaagcagatcttaaatgttctgactacacgaaaaaaaaaaaangccganttccancn

SEQ ID NO: 842 - DNA, 206 bp, Homo Sapiens
  misc_feature 168, 199, 205, 206: n = A,T,C or G
ctctagcatgcatgctcgagcggccgccagtgtgatggatatctgcagaattcggcttctgcttgatgacctcacacaagatctgactgtatcccagctcagtgatgttgcggattatctggaagatgttgcatagacacgaaaaaaaaaaaaagccgaattccagcncactgggcgggccgttactaggggatccganctcggnn

SEQ ID NO: 843 - DNA, 97 bp, Homo Sapiens
  misc_feature 7, 8, 83, 92, 94, 97: n = A,T,C or G
ctctagnntgcatgctcgagcggccgccagtgtgatggatatctgcagaattaattccagcacactggcggccgctcgtgcangcttcgagntngcn

SEQ ID NO: 844 - DNA, 229 bp, Homo Sapiens
  misc_feature 175, 200, 205, 220, 221, 229: n = A,T,C or G
gggcgaattgggccctctagcatgcatgctcgagcggccgccagtgtgatggatatctgcagaattcggcttctgcttgatgacctcacacaagatctgactgtatcccagctcagtgatgttgcggattatctggaagatgttgcatagacacgaaaaaaaaaaaaagccgganttccagcacactgggcgggccgttnctagnggatccgagctcggnnccaagctn

SEQ ID NO: 845 - DNA, 177 bp, Homo Sapiens
  misc_feature 174: n = A,T,C or G
gggcgaattgggccctctagcatgcatgctcgagcggccgccagtgtgatggatatctgcagaattcggcttctgcttgatgacctcacacaagatctgactgtatcccagctcagtgatgttgcggattatctggaagatgttgcatagacacgaaaaaaaaaaaaagccganttc

SEQ ID NO: 846 - DNA, 227 bp, Homo Sapiens
  misc_feature 168, 174, 180, 198, 212, 218, 224, 227: n = A,T,C or G
gggcgaattgggccctctagctgcatgctcgagcggccgccagtgtgatggatatctgcagaattcggcttctgcttgatgactatggttaataataatatattgtagacttgaaatctgctaggaaagcagatcttaaatgttctgactacacgaaaaaaaaaaaangccganttccancccactgggcggccgttnctaggggatccganctcggncccaanctn

SEQ ID NO: 847 - DNA, 104 bp, Homo Sapiens
  misc_feature 84, 94: n = A,T,C or G
gggcgaattgggccctctagcatgcatgctcgagcggccgccagtgtgatggatatctgcagaattcggctttttttttttttngggaagccanaacattaaaa

SEQ ID NO: 848 - DNA, 99 bp, Homo Sapiens
  misc_feature 70, 80, 92, 94, 99: n = A,T,C or G
ctctagcatgcatgctcgagcggccgccagtgtgatggatatctgcagaattcggctttttttttttttngggaagccanaacattaaaaancngcttn

SEQ ID NO: 849 - DNA, 104 bp, Homo Sapiens
  misc_feature 88, 96: n = A,T,C or G
gggcgaattgggccctctagcatgcatgctcgagcggccgccagtgtgatggatatctgcagaattcggctttttttttttttcgggnagccaaancattaaaa

SEQ ID NO: 850 - DNA, 114 bp, Homo Sapiens
  misc_feature 92, 106, 108, 114: n = A,T,C or G
ggcgaattgggccctctagatgcatgctcgagcggccgccagtgtgatggatatctgcagaattcggctttttttttttttcgggaagccanaacattaaaaatcngntttccn

SEQ ID NO: 851 - DNA, 108 bp, Homo Sapiens
  misc_feature 94, 104, 106, 108: n = A,T,C or G
ggcgaattgggccctctagatgcatgctcgagcggccgccagtgtgatggatatctgcagaattcggctttttttttttttcgggaagccaaancattaaaaancngn

SEQ ID NO: 852 - DNA, 233 bp, Homo Sapiens
  misc_feature 167, 173, 181, 183, 199, 213, 219, 228, 231, 233: n = A,T,C or G
ggcgaattgggccctctagctgcatgctcgagcggccgccagtgtgatggatatctgcagaattcggcttctgcttgatgactatggttaataataatatattgtagacttgaaatctgctaggaaagcagatcttaaatgttctgactacacgaaaaaaaaaaaangccganttccagcncncttgggcgggccgttnctaggggatccganctcggncccaagctnggngn

SEQ ID NO: 853 - DNA, 218 bp, Homo Sapiens
  misc_feature 160, 168, 187, 189, 197, 201, 210, 213, 218: n = A,T,C or G
ctctagctgcatgctcgagcggccgccagtgtgatggatatctgcagaattcggcttctgcttgatgacctcacacaagatctgactgtatcccagctcagtgatgttgcggattatctggaagatgttgcatagacacgaaaaaaaaaaaaagcccganttccagcncactgggcggccgttcgtncnggatccgngctnggccccaanctnggcgn

SEQ ID NO: 854 - DNA, 110 bp, Homo Sapiens
  misc_feature 104, 108, 110: n = A,T,C or G
agggcgaattgggccctctagcatgcatgctcgagcggccgccagtgtgatggatatctgcagaattcggcttaattccagcacactggcggccgctcgtgcangctncn

SEQ ID NO: 855 - DNA, 115 bp, Homo Sapiens
  misc_feature 88, 98, 101, 110, 114, 115: n = A,T,C or G
gatttgggccctctagatgcatgctcgagcggccgccagtgtgatggatatctgcagaattaattccagcacactggcggccgctcgngcatgcttcnagngggcccccnacgnn

SEQ ID NO: 856 - DNA, 214 bp, Homo Sapiens
  misc_feature 16, 208, 212, 214: n = A,T,C or G
aattgggccctctagntgcatgctcgagcggccgccagtgtgatggatatctgcagaattcggcttctgcttgatggtgactctgcaggagactctgaagtgactgctgggaaaccctttgggagacctgacctggggccaaaaataaagtgagccagcgtcatgaacgcatgctatttagggacacacctggaaaaaaaaaaaaaangccnan

SEQ ID NO: 857 - DNA, 74 bp, Homo Sapiens
  misc_feature 15, 37, 72, 73, 74: n = A,T,C or G
agactgttttttggngccctacaaccaggcatgctcnagcggccgccagtgtgatggatttctgcaaaattnnn

SEQ ID NO: 858 - DNA, 114 bp, Homo Sapiens
  misc_feature 93, 103: n = A,T,C or G
aattgggccctctagatgcatgctcgagcggccgccagtgtgatggatatctgcagaaagccgaattccagcacactggcggccgctcgtgcntgcttctagngggcccccaac

SEQ ID NO: 859 - DNA, 110 bp, Homo Sapiens
  misc_feature 105, 108, 110: n = A,T,C or G
ctctagatgcatgctcgagcggccgccagtgtgatggatatctgcagaattcggcttctgcttgatggaacacagatgggctgcttgatggaaaaaaaaaaaaanccnan

SEQ ID NO: 860 - DNA, 88 bp, Homo Sapiens
  misc_feature 84: n = A,T,C or G
gcgaattgggccctctagatgcatgctcgagcggccgccagtgtgatggatatctgcagaattccagcacactggcggccgctngtgc

SEQ ID NO: 861 - DNA, 86 bp, Homo Sapiens
  misc_feature 46, 84: n = A,T,C or G
attgtgccctctagcatgcatgctcgagcggccgccagtgtgatgnatatctgcagaattcatagcacactggcggccgctcgngc

SEQ ID NO: 862 - DNA, 71 bp, Homo Sapiens
  misc_feature 34, 70: n = A,T,C or G
gcatgctcgagcggccgccagtgtgatggatatntgcagaattccagcacactggcggccgctcgtgctng

SEQ ID NO: 863 - DNA, 261 bp, Homo Sapiens
  misc_feature 205, 209, 225: n = A,T,C or G
ctctagatgcatgctcgagcggccgccagtgtgatggatatctgcagaattcggcttctgcttgatggtgactctgcaggagactctgaagtgactgctgggaaaccctttgggagacctgacctggggccaaaaataaagtgagccagcgtcatgaacgcatgctatttagggaagccgaattccagcacactggcggccgttnctantggatccgagctcggnaccaagcttggcgtaatcatggtcatagctgttttc

SEQ ID NO: 864 - DNA, 166 bp, Homo Sapiens
gaattgggccctctagatgcatgctcgagcggccgccagtgtgatggatatctgcagaattcccccacatcatcaagcagaagccgaattccagcacactggcggccgttactagtggatccgagctcggtaccaagcttggcgtaatcatggtcatagctgtttc

SEQ ID NO: 865 - DNA, 24 bp, Homo Sapiens
  misc_feature 14, 22: n = A,T,C or G
catagctgtttctnttgagggnct

SEQ ID NO: 866 - DNA, 275 bp, Homo Sapiens
aattgggccctctagatgcatgctcgagcggccgccagtgtgatggatatctgcagaattcggcttctgcttgatggtgactctgcaggagactctgaagtgactgctgggaaaccctttgggagacctgacctggggccaaaaataaagtgagccagcgtcatgaacgcatgctatttagggaagccgaattccagcacactggcggccgttactagtggatccgagctcggtaccaagcttggcgtaatcatggtcatagctgttttcctgac

SEQ ID NO: 867 - DNA, 213 bp, Homo Sapiens
aattgggccctctagcatgcatgctcgagcggccgccagtgtgatggatatctgcagaattcggcttctgcttgatggagaaaactcgtacaagtgcagcaagtgtaaaaagatggttccagcttcaaagaggttcactatccatagatcctctaatgttcttacactttctctgaaacgttttgcaaattttaccggtggaaaaaaaaaaaa

SEQ ID NO: 868 - DNA, 88 bp, Homo Sapiens
  misc_feature 81, 82, 88: n = A,T,C or G
ctctagatgcatgctcgagcggccgccagtgtgatggatatctgcagaattaattccagcacactggcggccgctcgtgcnngcttcn

SEQ ID NO: 869 - DNA, 59 bp, Homo Sapiens
  misc_feature 8, 17, 34, 59: n = A,T,C or G
gtttcctnagggaaaanccgcatgctcgagcggncgccagagagaaggatttttggagn

SEQ ID NO: 870 - DNA, 224 bp, Homo Sapiens
attgggccctctagctgcatgctcgagcggccgccagtgtgatggatatctgcagaattcggcttctgcttgatgaggaagagcagctgctgagaaggcatcgcaaagagaagaaggagttgcaagccaaaattcagggcatgaagaatgcctgttcccaagaatgacaagaagaggaggaagcaacctcaccgaagatgtggccaagttggaaaaaaaaaaaa

SEQ ID NO: 871 - DNA, 89 bp, Homo Sapiens
  misc_feature 74, 80, 86, 89: n = A,T,C or G
ccctctagatgcatgctcgagcggccgccagtgtgatggatatctgcagaattccagcacactggcggccgctngtgcangcttcnagn

SEQ ID NO: 872 - DNA, 249 bp, Homo Sapiens
  misc_feature 197, 203, 207, 220, 234, 240, 246, 249: n = A,T,C or G
aattgggccctctagctgcatgctcgagcggccgccagtgtgatggatatctgcagaattcggcttctgcttgatggtgactctgcaggagactctgaagtgactgctgggaaaccctttgggagacctgacctggggccaaaaataaagtgagccagcgtcatgaacgcatgctatttagggaaaaaaaaaaaaanttccancccnctggcggccgttnctaggggatccganctcggncccaanctn

SEQ ID NO: 873 - DNA, 87 bp, Homo Sapiens
  misc_feature 82: n = A,T,C or G
ccctctagagcatgctcgagcggccgccagtgtgatggatatctgcagaattcggcttctgcttgatgctctaaaggaaaanaggcc

SEQ ID NO: 874 - DNA, 102 bp, Homo Sapiens
  misc_feature 9, 97, 98, 102: n = A,T,C or G
tagggcganttgggccctctagatgcatgctcgagcggccgccagtgtgatggatatctgcagaattaattccagcacactggcggccgctcgtgcnngctn

SEQ ID NO: 875 - DNA, 172 bp, Homo Sapiens
  misc_feature 167, 170, 172: n = A,T,C or G
ccctctagatgcatgctcgagcggccgccagtgtgatggatatctgcagaattcggcttctgcttgatgtggattgttctgaggaagtgattaaacacttaatcatggcagtgagaggacagttctctactgatgagttggtggctgaagtggaaaaaaaaaaaaanccnan

SEQ ID NO: 876 - DNA, 162 bp, Homo Sapiens
  misc_feature 2: n = A,T,C or G
anttgggccctctagcagcatgctcgagcggccgccagtgtgatggatatctgcagaattcggcttctgcttgatgttagctgtggccactgtggatttttcgcaagaacattaataaactaaaaacttcatgtgtctgcttgatggaaaaaaaaaaaaagc

SEQ ID NO: 877 - DNA, 244 bp, Homo Sapiens
  misc_feature 189, 233: n = A,T,C or G
aattgggccctctagatgcatgctcgagcggccgccagtgtgatggatatctgcagaattcggcttctgcttgatgtggattgttctgaggaagtgattaaacacttaatcatggcagtgagaggacagttctctactgatgagttggtggctgaagttttttttttccacattaatagcatcaagcanaagccgaattccagcacactggcggccgctcgtgctggctccgngcgggccccca

SEQ ID NO: 878 - DNA, 91 bp, Homo Sapiens
  misc_feature 45, 84, 85, 91: n = A,T,C or G
ccctctagcatgcatgctcgagcggccgccagtgtgatggatatntgcagaattaattccagcacactggcggccgctcgtgcnngcttcn

SEQ ID NO: 879 - DNA, 106 bp, Homo Sapiens
  misc_feature 54, 99, 100, 106: n = A,T,C or G
gcgaattgggccctctagatgcatgctcgagcggccgccagtgtgatggatatntgcagaattaagccgaattccagcacactggcggccgctcgtgcnngcttcn

SEQ ID NO: 880 - DNA, 95 bp, Homo Sapiens
  misc_feature 90, 91, 95: n = A,T,C or G
ccctctagatgcatgctcgagcggccgccagtgtgatggatatctgcagaattaagccgaattccagcacacctggcggccgctcgtgcnngctn

SEQ ID NO: 881 - DNA, 35 bp, Homo Sapiens
ttctgcttgatgctattaatgtggaaaaaaaaaaa

SEQ ID NO: 882 - DNA, 43 bp, Homo Sapiens
  misc_feature 38, 41, 43: n = A,T,C or G
ttctgcttgatgctattaatgtggaaaaaaaaaaaaanccnan

SEQ ID NO: 883 - DNA, 43 bp, Homo Sapiens; identical to SEQ ID NO: 882
  misc_feature 38, 41, 43: n = A,T,C or G

SEQ ID NO: 884 - DNA, 35 bp, Homo Sapiens; identical to SEQ ID NO: 881

SEQ ID NO: 885 - DNA, 36 bp, Homo Sapiens
  misc_feature 36: n = A,T,C or G
aattccagcacactggcggccgctcgtgcaggattn

SEQ ID NO: 886 - DNA, 43 bp, Homo Sapiens; identical to SEQ ID NO: 882
  misc_feature 38, 41, 43: n = A,T,C or G

SEQ ID NO: 887 - DNA, 35 bp, Homo Sapiens; identical to SEQ ID NO: 881

SEQ ID NO: 888 - DNA, 43 bp, Homo Sapiens; identical to SEQ ID NO: 882
  misc_feature 38, 41, 43: n = A,T,C or G

SEQ ID NO: 889 - DNA, 43 bp, Homo Sapiens; identical to SEQ ID NO: 882
  misc_feature 38, 41, 43: n = A,T,C or G

SEQ ID NO: 890 - DNA, 34 bp, Homo Sapiens
ttctgcttgatgctattaatgtggaaaaaaaaaa

SEQ ID NO: 891 - DNA, 36 bp, Homo Sapiens
  misc_feature 31, 35: n = A,T,C or G
aattccagcacactggcggccgctcgtgcangctnc

SEQ ID NO: 892 - DNA, 32 bp, Homo Sapiens
ttctgcttgatgctattaatgtggaaaaaaaa

SEQ ID NO: 893 - DNA, 35 bp, Homo Sapiens; identical to SEQ ID NO: 190
  misc_feature 30, 31, 35: n = A,T,C or G

SEQ ID NO: 894 - DNA, 47 bp, Homo Sapiens
  misc_feature 38, 41, 47: n = A,T,C or G
aattccagcacacctggcggccgctcgtgcatgcttcnagngggccn

SEQ ID NO: 895 - DNA, 41 bp, Homo Sapiens
  misc_feature 33: n = A,T,C or G
ttaattccagcacactggcggccgctcgtgcangcttctaa

SEQ ID NO: 896 - DNA, 92 bp, Homo Sapiens
  misc_feature 27, 32, 37, 48, 53, 63, 65, 88, 91, 92: n = A,T,C or G
ttaattccagcacactggcggccgctngtgcnggctncgagcgggccnccaangttggctgtnancatggtcatagctgtttcctgangann

SEQ ID NO: 897 - DNA, 57 bp, Homo Sapiens
  misc_feature 27, 40, 49, 53, 57: n = A,T,C or G
aattccagcacactggcggccgctcgngcatgcttctagngggcccccnacgncctn

SEQ ID NO: 898 - DNA, 54 bp, Homo Sapiens
  misc_feature 29, 42: n = A,T,C or G
ttaattccagcacactggcggccgctcgngcatgcttctagngggcccccaacg

SEQ ID NO: 899 - DNA, 57 bp, Homo Sapiens
  misc_feature 27, 40, 53, 54, 57: n = A,T,C or G
aattccagcacactggcggccgctcgngcatgcttctagngggcccccaacgnnctn

SEQ ID NO: 900 - DNA, 56 bp, Homo Sapiens
  misc_feature 27, 40, 53, 54, 56: n = A,T,C or G
aattccagcacactggcggccgctcgngcatgcttctagngggcccccaacgnncn

SEQ ID NO: 901 - DNA, 54 bp, Homo Sapiens
  misc_feature 27, 40, 46, 53, 54: n = A,T,C or G
aattccagcacactggcggccgctcgngcatgcttctagngggccnccaacgnn

SEQ ID NO: 902 - DNA, 185 bp, Homo Sapiens
ttgttttcgcagtaaaggcagacactaaataagaagtcacagcagaacagaggttgctaaactgtggcctggagctaagaatgggttctgcatttttaaagggatataagaaaaaggagagtgatagcgtgtgacccacagagcgcagaatacttgctgtgtggcccttcaccgaaaaaaaaaaa

SEQ ID NO: 903 - DNA, 41 bp, Homo Sapiens
  misc_feature 28, 35, 40, 41: n = A,T,C or G
agcacactggcggccgctcgagcatgcntctaganggccnn

SEQ ID NO: 904 - DNA, 292 bp, Homo Sapiens
ttgttttcgcaggccacagaacttcgccaggtattccttcggttttcccttctctaactcagaagaaccaattttaacaattgtttcaaagctacccaacaaggagaggcatgggtgttttccccacaatttaggactcaattctttagatcaacattttttggtgaaaagtacaggcggaataaaactatttttaaatactcatttgtttattaattttataggtaattaggcttttaccaggcaccaggcactgggctacctgctggtaaatcaatccccccgaaaaaaa

SEQ ID NO: 905 - DNA, 31 bp, Homo Sapiens
  misc_feature 6, 11, 26, 30, 31: n = A,T,C or G
agatanactgncggccgcttagagcntgcnn

SEQ ID NO: 906 - DNA, 43 bp, Homo Sapiens
  misc_feature 30, 37, 42, 43: n = A,T,C or G
agcacacctggcaggccgctcgagcatgcntctaganggccnn

SEQ ID NO: 907 - DNA, 85 bp, Homo Sapiens
  misc_feature 18, 39, 52, 61, 77, 80, 85: n = A,T,C or G
acactggcggccgctcgngcatgcatctagagggcccanttcgccctatagngagtcgtantacaatgtcacctggncgncgttn

SEQ ID NO: 908 - DNA, 34 bp, Homo Sapiens
  misc_feature 28, 31: n = A,T,C or G
agcacactggcggccgctcgagcatgcntcnagc

SEQ ID NO: 909 - DNA, 185 bp, Homo Sapiens; identical to SEQ ID NO: 902

SEQ ID NO: 910 - DNA, 40 bp, Homo Sapiens
  misc_feature 18, 25, 37, 38, 40: n = A,T,C or G
acactggcggccgctcgngcatgcntctagagggccnncn

SEQ ID NO: 911 - DNA, 39 bp, Homo Sapiens
  misc_feature 28, 35: n = A,T,C or G
agcacactggcggccgctcgagcatgcntctaganggcg

SEQ ID NO: 912 - DNA, 43 bp, Homo Sapiens
  misc_feature 21, 28, 41, 42, 43: n = A,T,C or G
agcacactggcggccgctcgngcatgcntctagagggcccnnn

SEQ ID NO: 913 - DNA, 44 bp, Homo Sapiens
  misc_feature 21, 28, 41, 43, 44: n = A,T,C or G
agcacactggcggccgctcgngcatgcntctagagggcccncnn

SEQ ID NO: 914 - DNA, 43 bp, Homo Sapiens
  misc_feature 21, 41, 42, 43: n = A,T,C or G
agcacactggcggccgctcgngcatgcatctagagggcccnnn

SEQ ID NO: 915 - DNA, 43 bp, Homo Sapiens
  misc_feature 21, 34, 41, 43: n = A,T,C or G
agcacactggcggccgctcgngcatgcttctagngggcccncn

SEQ ID NO: 916 - DNA, 34 bp, Homo Sapiens
  misc_feature 21: n = A,T,C or G
agcacactggcggccgctcgngcatgcttctaga

SEQ ID NO: 917 - DNA, 48 bp, Homo Sapiens
  misc_feature 31, 34, 43, 47, 48: n = A,T,C or G
agcacactggcggccgctcgtgcatgcttcnagngggcccccnacgnn

SEQ ID NO: 918 - DNA, 57 bp, Homo Sapiens
  misc_feature 40, 53, 56, 57: n = A,T,C or G
aattccagcacactggcggccgctcgtgcatgcttctagngggcccccaacgnccnn

SEQ ID NO: 919 - DNA, 184 bp, Homo Sapiens
ttgttttcgcagacaagaagcgcaggacaggctgcattggggccaaacacagaaccagcaaagaggaggccatgcgctggttccagcagaagtatgatgggatcatccttcctggcaaataaattcccgtttctatccaaaagagcaataaaaagttttcagtgaaatgtgcgaaaaaaaaaaa

SEQ ID NO: 920 - DNA, 183 bp, Homo Sapiens
ttgttttcgcagagagagaaagagatgaaatacacttcggttttctcttaaaagatgcatgtatcatacgtgctttaagcaagtcatgtggccaagcctagcatcatggagccagaaagtatagccttgctgtctgtctacatcatgatgtataaattgatatatctacacgaaaaaaaaaaa

SEQ ID NO: 921 - DNA, 43 bp, Homo Sapiens
  misc_feature 21, 28, 35, 41, 43: n = A,T,C or G
agcacactggcggccgctcgngcatgcntctaganggcccncn

SEQ ID NO: 922 - DNA, 49 bp, Homo Sapiens
  misc_feature 44, 47, 49: n = A,T,C or G
ttgttttcgcagtgcagccaagttttatcgaaaaaaaaaaaaanccnan

SEQ ID NO: 923 - DNA, 119 bp, Homo Sapiens
  misc_feature 81, 88, 94, 98, 112, 116, 119: n = A,T,C or G
ttgttttcgcagcctgaggaaaaaaagagaaaaagataaaaaaaatctgaaaacgcttcaaaatcccgaaaaaaaaaaaangccgganttccancccncttggcgggcccgntcgngcn

SEQ ID NO: 924 - DNA, 53 bp, Homo Sapiens
ttgttttcgcaggtactgtaataggtgttgtcatttataccgaaaaaaaaaaa

SEQ ID NO: 925 - DNA, 75 bp, Homo Sapiens
ttgttttcgcagaacattcaggtattaaaaggaaaaataaagccctcctggggacttggaatcgaaaaaaaaaaa

SEQ ID NO: 926 - DNA, 44 bp, Homo Sapiens; identical to SEQ ID NO: 913
  misc_feature 21, 28, 41, 43, 44: n = A,T,C or G

SEQ ID NO: 927 - DNA, 43 bp, Homo Sapiens; identical to SEQ ID NO: 914
  misc_feature 21, 41, 42, 43: n = A,T,C or G

SEQ ID NO: 928 - DNA, 50 bp, Homo Sapiens
  misc_feature 18, 38: n = A,T,C or G
acactggcggccgctcgngcatgcatctagagggcccncttcgccctata

SEQ ID NO: 929 - DNA, 41 bp, Homo Sapiens
  misc_feature 19, 22, 34, 36, 41: n = A,T,C or G
agcacactggcggccgctngtncatgcttctagngngcccn

SEQ ID NO: 930 - DNA, 43 bp, Homo Sapiens; identical to SEQ ID NO: 912
  misc_feature 21, 28, 41, 42, 43: n = A,T,C or G

SEQ ID NO: 931 - DNA, 43 bp, Homo Sapiens; identical to SEQ ID NO: 912
  misc_feature 21, 28, 41, 42, 43: n = A,T,C or G

SEQ ID NO: 932 - DNA, 93 bp, Homo Sapiens
  misc_feature 32, 33, 48, 53, 63, 65, 76, 90, 91, 93: n = A,T,C or G
cgaattccagcacactggcggccgctcgtgcnngcttcgagcgggccnccaangttggctgtnancgtggtcatanctgtttcctgacgnngn

SEQ ID NO: 933 - DNA, 92 bp, Homo Sapiens
  misc_feature 84, 86, 92: n = A,T,C or G
ttgttttcgcagcctgaggaaaaaaagagaaaaagataaaaaaaatctgaaaacgcttcaaaatcccgaaaaaaaaaaaaaaangncaaaan

SEQ ID NO: 934 - DNA, 54 bp, Homo Sapiens
  misc_feature 30, 40, 46, 53, 54: n = A,T,C or G
aattccagcacactggcggccgctcgtgcntgcttctagngggccnccaacgnn

SEQ ID NO: 935 - DNA, 48 bp, Homo Sapiens
  misc_feature 21, 28, 41, 43, 48: n = A,T,C or G
agcacactggcggccgctcgngcatgcntctagagggcccncntcgcn

SEQ ID NO: 936 - DNA, 40 bp, Homo Sapiens
  misc_feature 35, 36, 40: n = A,T,C or G
agcacactggcggccgctcgagcatgcttctagannggcn

SEQ ID NO: 937 - DNA, 44 bp, Homo Sapiens
  misc_feature 21, 41, 42, 44: n = A,T,C or G
agcacactggcggccgctcgngcatgcatctagagggcccnnan

SEQ ID NO: 938 - DNA, 120 bp, Homo Sapiens
  misc_feature 103, 115, 116, 120: n = A,T,C or G
ttgttttcgcagagttttttttttcgattaaaaactttttatttcagcaaaataaacgtgcctgcgaaaacaagccgaattccagcgcactggcggccagttngtgcgggctccnngcgn

SEQ ID NO: 939 - DNA, 55 bp, Homo Sapiens
  misc_feature 30, 40, 46, 54, 55: n = A,T,C or G
aattccagcacactggcggccgctcgtgcntgcttctagngggccnccaacgtnn

SEQ ID NO: 940 - DNA, 54 bp, Homo Sapiens
  misc_feature 30, 31, 40, 46, 52, 54: n = A,T,C or G
aattccagcacactggcggccgctcgtgcnngcttcgagngggccnccaacntn

SEQ ID NO: 941 - DNA, 49 bp, Homo Sapiens
  misc_feature 40, 46, 49: n = A,T,C or G
aattccagcacactggcggccgctcgtgcatgcttctagngggccnccn

SEQ ID NO: 942 - DNA, 62 bp, Homo Sapiens
  misc_feature 40, 56, 57, 62: n = A,T,C or G
aattccagcacactggcggccgctcgtgcatgcttctagngggcccccaacgttgnntgtgn

SEQ ID NO: 943 - DNA, 95 bp, Homo Sapiens
ttgttttcgcaggcagccaacaagcaattaagagcagttataatagaggaagctgggggacccattttgcaccatgagtttgtgaaaaaaaaaaa

SEQ ID NO: 944 - DNA, 35 bp, Homo Sapiens; identical to SEQ ID NO: 190
  misc_feature 30, 31, 35: n = A,T,C or G

SEQ ID NO: 945 - DNA, 40 bp, Homo Sapiens; identical to SEQ ID NO: 707
  misc_feature 27, 34, 37, 40: n = A,T,C or G

SEQ ID NO: 946 - DNA, 59 bp, Homo Sapiens
  misc_feature 30, 31, 51, 55: n = A,T,C or G
aattccagcacactggcggccgctcgtgcnngcttcgagcgggcccccaangtcngctg

SEQ ID NO: 947 - DNA, 111 bp, Homo Sapiens
  misc_feature 106, 109, 111: n = A,T,C or G
ttgttttcgcagtgtaaggtgacataatcatagttgtagcaccagagagtgaaggttatgggtgcacaggtcctatgaggcttagtttggtgaaaaaaaaaaaaanccnan

SEQ ID NO: 948 - DNA, 103 bp, Homo Sapiens
ttgttttcgcagtgtaaggtgacataatcacagttgtagcaccagagagtgaaggttatgggtgcacaggtcctatgaggcttagtttggtgaaaaaaaaaaa

SEQ ID NO: 949 - DNA, 111 bp, Homo Sapiens
  misc_feature 106, 109, 111: n = A,T,C or G
ttgttttcgcagtgtaaggtgacataatcacagttgtagcaccagagagtgaaggttatgggtgcacaggtcctatgaggcttagtttggtgaaaaaaaaaaaaanccnan

SEQ ID NO: 950 - DNA, 105 bp, Homo Sapiens
  misc_feature 54: n = A,T,C or G
cgattttgggccctctagatgcatgctcgagcggccgccagtgtgatggatatntgcagaattccagcacactggcggccgctcgagcatgcatctagagggccc

SEQ ID NO: 951 - DNA, 168 bp, Homo Sapiens
  misc_feature 163, 166, 168: n = A,T,C or G
ccctctagatgcatgctcgagcggccgccagtgtgatggatatctgcagaattcggcttgttttcgcagtgtaaggtgacataatcacagttgtagcaccagagagtgaaggttatgggtgcacaggtcctatgaggcttagtttggtgaaaaaaaaaaaaanccnan

SEQ ID NO: 952 - DNA, 160 bp, Homo Sapiens
  misc_feature 36, 150, 156: n = A,T,C or G
atgcatgctcgagcggccgccagtgtgatggatatntgcagaattcggcttgttttcgcagagctgaagatcaagcgcctgagaaagaagtttgcccaaaagatgcttcgaaaggcaaggaggaagccttatctatgaaaaaaaaaaaangccganttcc

SEQ ID NO: 953 - DNA, 169 bp, Homo Sapiens
  misc_feature 150, 156, 164, 166, 169: n = A,T,C or G
atgctcgagcggccgccagtgtgatggatatttgcagaattcggcttgttttcgcagtgtaaggtgacataatcacagttgtagcaccagagagtgaaggttatgggtgcacaggtcctatgaggcttagtttggtgaaaaaaaaaaaangccganttccagcncncgn

SEQ ID NO: 954 - DNA, 235 bp, Homo Sapiens
  misc_feature 169, 174, 182, 204, 212, 214, 227, 233, 235: n = A,T,C or G
attgggccctctagatgcatgctcgagcggccgccagtgtgatggatatctgcagaattcggcttgttttcgcagtgtaaggtgacataatcatagttgtagcaccagagagtgaaggttatgggtgcacaggtcctatgaggcttagtttggtgaaaaaaaaaaaaanccganttccagcncacttggcgggccgctcgtgcnggctccgngngggcccccaaccncggcgngn

SEQ ID NO: 955 - DNA, 224 bp, Homo Sapiens
  misc_feature 167, 175, 219, 221, 224: n = A,T,C or G
ctctagcatgcatgctcgagcggccgccagtgtgatggatatctgcagaattcggcttgttttcgcagtgtaaggtgacataatcacagttgtagcaccagagagtgatggttatgggtgcacaggtcctatgaggcttagtttggtgaaaaaaaaaaaaagccganttccagcncactggcggccgctccgtgctggctccgggggggcccccaaccncngcn

SEQ ID NO: 956 - DNA, 55 bp, Homo Sapiens
  misc_feature 52, 53, 55: n = A,T,C or G
ctctagatgcatgctcgagcggccgccagtgtgatggatatctgcagaattnngn

SEQ ID NO: 957 - DNA, 174 bp, Homo Sapiens
  misc_feature 141, 147, 151, 169, 171, 174: n = A,T,C or G
ctctagatgcatgctcgagcggccgccagtgtgatggatatctgcagaattcggcttgttttcgcaggttgggctgttacaaatactgctgctataaatattcttgtacatttctcttggtgaaaaaaaaaaaaagccganttccancccncttggcgggccgttcctncnggn

SEQ ID NO: 958 - DNA, 112 bp, Homo Sapiens
  misc_feature 93, 96, 103, 106, 112: n = A,T,C or G
agggcgaattgggccctctagatgcatgctcgagcggccgccagtgtgatggatatctgcagaattaattccagcacactggcggccgctcgngcntgcttcnagngggccn

SEQ ID NO: 959 - DNA, 159 bp, Homo Sapiens
  misc_feature 156: n = A,T,C or G
gggcgaattgggccctctagatgcatgctcgagcggccgccagtgtgatggatatctgcagaattcggcttgttttcgcagtaggttaatagtggggggtaaggcgaggttagcgaggcttgctagaagtcatcatgaaaaaaaaaaaaagccganttc

SEQ ID NO: 960 - DNA, 115 bp, Homo Sapiens
  misc_feature 90, 94, 106, 107, 115: n = A,T,C or G
cgatttgggccctctacatgcatgctcgagcggccgccagtgtgatggatatctgcagaattccagcacactggctggccgctcgagcangcanctagagggcccnnaacgcccn

SEQ ID NO: 961 - DNA, 79 bp, Homo Sapiens
atgcatgctcgagcggccgccagtgtgatggatatctgcagaattagccgaattccagcacactggcggccgctcgagc

SEQ ID NO: 962 - DNA, 145 bp, Homo Sapiens
  misc_feature 137, 143, 145: n = A,T,C or G
ccctctagcatgcatgctcgagcggccgccagtgtgatggatatctgcagaattcggcttgttttcgcagctgttaataattatcactgggattcattatttcattaagagttgcaaaatgatgaaaaaaaaaaaangccgantn

SEQ ID NO: 963 - DNA, 72 bp, Homo Sapiens
  misc_feature 72: n = A,T,C or G
ctctagatgcatgctcgagcggccgccagtgtgatggatatctgcagaattccagcacactggcggccgctn

SEQ ID NO: 964 - DNA, 92 bp, Homo Sapiens
  misc_feature 84, 88, 92: n = A,T,C or G
ggcgaattgggccctctagcatgcatgctcgagcggccgccagtgtgatggatatctgcagaattcggctttttttttttttcncggncccn

SEQ ID NO: 965 - DNA, 98 bp, Homo Sapiens
  misc_feature 86, 90, 98: n = A,T,C or G
cgaattgggccctctagcatgcatgctcgagcggccgccagtgtgatggatatctgcagaattcggctttttttttttttcacggncccnggggcatn

SEQ ID NO: 966 - DNA, 98 bp, Homo Sapiens
  misc_feature 51, 83, 96, 97, 98: n = A,T,C or G
aattgggccctctagatgcatgctcgagcggccgccagtgtgatggatatntgcagaattccagcacactggcggccgctcgngcatgcttctagnnn

SEQ ID NO: 967 - DNA, 95 bp, Homo Sapiens
gcgaattgggccctctagatgcatgctcgagcggccgccagtgtgatggatatctgcagaattcggcttaattccagcacactggcggccgctcg

SEQ ID NO: 968 - DNA, 101 bp, Homo Sapiens
  misc_feature 79, 95: n = A,T,C or G
cgattttgggccctctacatgcatgctcgagcggccgccagtgtgatggatatctgcagaattcggcttaattccagcncacctggcaggccgcnctcagc

SEQ ID NO: 969 - DNA, 152 bp, Homo Sapiens
  misc_feature 100, 105: n = A,T,C or G
agggcgaattgggccctctagatgcatgctcgagcggccgccagtgtgatggatatctgcagaattaagccgaattccagcacactggcggccgctcgtnctggntccgagctcggtaccaagcttggcgtaatcatggtcatagctgtttc

SEQ ID NO: 970 - DNA, 122 bp, Homo Sapiens
  misc_feature 102, 109, 112: n = A,T,C or G
agggcgaattgggccctctagatgcatgctcgagcggccgccagtgtgatggatatctgcagaattaagccgaattccagcacactggcggccgctcgtgcntgcttcnagngggcccccaa

SEQ ID NO: 971 - DNA, 119 bp, Homo Sapiens
  misc_feature 102, 112, 118: n = A,T,C or G
agggcgaattgggccctctagatgcatgctcgagcggccgccagtgtgatggatatctgcagaattaagccgaattccagcacactggcggccgctcgtgcntgcttctagngggccnc

SEQ ID NO: 972 - DNA, 103 bp, Homo Sapiens
  misc_feature 95, 99, 103: n = A,T,C or G
cgatttgggccctctagatgcatgctcgagcggccgccagtgtgatggatatctgcagaattcggcttaattccagcacactggcggccgctcgngcangcan

SEQ ID NO: 973 - DNA, 106 bp, Homo Sapiens
  misc_feature 88, 101, 102, 106: n = A,T,C or G
gaattgggccctctagatgcatgctcgagcggccgccagtgtgatggatatctgcagaattaattccagcacactggcggccgctcgngcatgcttcgagnngggn

SEQ ID NO: 974 - DNA, 104 bp, Homo Sapiens
  misc_feature 24: n = A,T,C or G
atagggcgaattgggccctctagnatgcatgctcgagcggccgccagtgtgatggatatctgcagaattaagccgaattccagcacactggcggccgctcgtgc

SEQ ID NO: 975 - DNA, 163 bp, Homo Sapiens
  misc_feature 132, 147, 152, 159, 162, 163: n = A,T,C or G
atgctcgagcggccgccagtgtgatggatatctgcagaattcggcttgttttcgcaggtaagataacttttaagaatgtgaatggcatgggaaaaagccgaattccagcacactggcggccagctccgtgcnggcttctagcggggncccangcgttgnccnn

SEQ ID NO: 976 - DNA, 108 bp, Homo Sapiens
  misc_feature 103, 104, 108: n = A,T,C or G
tagggcgaattgggccctctagatgcatgctcgagcggccgccagtgtgatggatatctgcagaattcggcttaattccagcacactggcggccgctcgtgcnngctn

SEQ ID NO: 977 - DNA, 98 bp, Homo Sapiens
cgaattgggccctctagatgcatgctcgagcggccgccagtgtgatggatatctgcagaattcggcttaattccagcacactggcggccgctcgtgca

SEQ ID NO: 978 - DNA, 158 bp, Homo Sapiens
  misc_feature 96, 97, 107, 108, 156, 157, 158: n = A,T,C or G
aattgggccctctagatgcatgctcgagcggccgccagtgtgatggatatctgcagaattaagccgaattccagcacactggcggccgctcgtgcnngcttctagcnngccaccaagcgttggcgtaatcatggtcatagctgtttcctgaatatnnn

SEQ ID NO: 979 - DNA, 106 bp, Homo Sapiens
  misc_feature 18, 54, 91, 104, 105, 106: n = A,T,C or G
gcgatttgggccctctanatgcatgctcgagcggccgccagtgtgatggatatntgcagaattaattccagcacactggcaggccgctcgngcatgcttctagnnn

SEQ ID NO: 980 - DNA, 189 bp, Homo Sapiens
  misc_feature 157, 168, 170: n = A,T,C or G
gaattgggccctctagcatgcatgctcgagcggccgccagtgtgatggatatctgcagaattcggcttgttttcgcagcctataacttttcagctggtgcttttacttagggaaaaaaaaaaaaagccgaattccagcacacttggcggccgctcgngctggctccgngngggcccccaaccctcggcg

SEQ ID NO: 981 - DNA, 96 bp, Homo Sapiens
  misc_feature 51, 95: n = A,T,C or G
aattgggccctctagctgcatgctcgagcggccgccagtgtgatggatatntgcagaattagccgaattccagcacactggcggccgctcgtgcnt

SEQ ID NO: 982 - DNA, 109 bp, Homo Sapiens
  misc_feature 51, 98, 105, 108, 109: n = A,T,C or G
aattgggccctctagatgcatgctcgagcggccgccagtgtgatggatatntgcagaattaagccgaattccagcacacctggcaggccgctcgtgcntgcttcnagnn

SEQ ID NO: 983 - DNA, 88 bp, Homo Sapiens
agggcgaattgggccctctagatgcatgctcgagcggccgccagtgtgatggatatctgcagaattaattccagcacactggcggccg

SEQ ID NO: 984 - DNA, 84 bp, Homo Sapiens
  misc_feature 64, 80: n = A,T,C or G
gcgatttgggccctctacatgcatgctcgagcggccgccagtgtgatggatatctgcagaattnggcttttttttttttnccca

SEQ ID NO: 985 - DNA, 146 bp, Homo Sapiens
  misc_feature 89, 95: n = A,T,C or G
agggcgaattgggccctctagatgcatgctcgagcggccgccagtgtgatggatatctgcagaattcggctcagcacactggcggccgntactantggatccgagctcggtaccaagcttggcgtaatcatggtcatagctgtttc

SEQ ID NO: 986 - DNA, 136 bp, Homo Sapiens
  misc_feature 135: n = A,T,C or G
gggcgaattgggccctctagcatgcatgctcgagcggccgccagtgtgatggatatctgcagaattcggcttgttttcgcagcctataacttttcagctggtgcttttacttagggaaaaaaaaaaaaagccgant

SEQ ID NO: 987 - DNA, 94 bp, Homo Sapiens
  misc_feature 18, 90, 93, 94: n = A,T,C or G
gcgatttgggccctctanatgcatgctcgagcggccgccagtgtgatggatatctgcagaattaattccagcacactggcggccgctcgngcnn

SEQ ID NO: 988 - DNA, 108 bp, Homo Sapiens
  misc_feature 90, 97: n = A,T,C or G
tagggcgaattgggccctctagatgcatgctcgagcggccgccagtgtgatggatatctgcagaattccagcacactggcggccgctcgngcatgcntctagagggcc

SEQ ID NO: 989 - DNA, 169 bp, Homo Sapiens
  misc_feature 114: n = A,T,C or G
gggcgaattgggccctctagatgcatgctcgagcggccgccagtgtgatggatatctgcagaattcggctttcctgcgaaaacaagccgaattccagcacactggcggccgctngtactggatccgagctcggtaccaagcttggcgtaatcatggtcatagctgtttc

SEQ ID NO: 990 - DNA, 105 bp, Homo Sapiens
  misc_feature 51, 84, 91, 98, 104, 105: n = A,T,C or G
aattgggccctctagatgcatgctcgagcggccgccagtgtgatggatatntgcagaattccagcacacctggcggccgctcgngcatgcntctaganggcccnn

SEQ ID NO: 991 - DNA, 106 bp, Homo Sapiens
  misc_feature 97, 104, 106: n = A,T,C or G
aattgggccctctagatgcatgctcgagcggccgccagtgtgatggatatttgcagaattccagcacactggcggccgctcgagcatgcatctaganggcccanan

SEQ ID NO: 992 - DNA, 145 bp, Homo Sapiens
  misc_feature 51, 90, 97, 102, 107, 119, 125, 129, 142, 143, 145: n = A,T,C or G
aattgggccctctagatgcatgctcgagcggccgccagtgtgatggatatntgcagaattccagcacactggcggccgctcgagcatgcntctaganggccnccaangttggagtaatnatggtnatancctgtttcctgcnngn

SEQ ID NO: 993 - DNA, 88 bp, Homo Sapiens
  misc_feature 86: n = A,T,C or G
aattgggccctctagatgcatgctcgagcggccgccagtgtgatggatatctgcagaattccagcacactggcggccgctcgtgcntg

SEQ ID NO: 994 - DNA, 164 bp, Homo Sapiens
  misc_feature 107: n = A,T,C or G
agggcgaattgggccctctagatgcatgctcgagcggccgccagtgtgatggatatctgcagaattcggcttgttttcgcagggaattccagcacactggcggccgntactactggatccgagctcggtaccaagcttggcgtaatcatggtcatagctgtttc

SEQ ID NO: 995 - DNA, 147 bp, Homo Sapiens
  misc_feature 92, 100: n = A,T,C or G
tagggcgaattgggccctctagatgcatgctcgagcggccgccagtgtgatggatatctgcagaattaattccagcacactggcggccgctnctactggntccgagctcggtaccaagcttggcgtaatcatggtcatagctgtttc

SEQ ID NO: 996 - DNA, 85 bp, Homo Sapiens
agggcgaattgggccctctagatgcatgctcgagcggccgccagtgtgatggatatctgcagaattaattccagcacactggcgg

SEQ ID NO: 997 - DNA, 85 bp, Homo Sapiens
tagggcgaattgggccctctagatgcatgctcgagcggccgccagtgtgatggatatctgcagaattccagcacactggcggccg

SEQ ID NO: 998 - DNA, 95 bp, Homo Sapiens
agggcgaattgggccctctagatgcatgctcgagcggccgccagtgtgatggatatctgcagaattcggcttgttttcgcaggaaaaaaaaaaaa

SEQ ID NO: 999 - DNA, 109 bp, Homo Sapiens
  misc_feature 57, 89, 96, 103, 108, 109: n = A,T,C or G
agggcgatttgggccctctagatgcatgctcgagcggccgccagtgtgatggatatntgcagaattccagcacactggcggccgctcgntcatgcntctaganggccnn

SEQ ID NO: 1000 - DNA, 95 bp, Homo Sapiens
  misc_feature 15, 90, 91, 95: n = A,T,C or G
atttgggccctctanatgcatgctcgagcggccgccagtgtgatggatatctgcagaattaattccagcacactggcggccgctcgtgcnngctn

SEQ ID NO: 1001 - DNA, 107 bp, Homo Sapiens
  misc_feature 8, 89: n = A,T,C or G
agggcganttgggccctctagatgcatgctcgagcggccgccagtgtgatggatatctgcagaattccagcacactggcggccgctcgngcatgcttctagagggcc

SEQ ID NO: 1002 - DNA, 84 bp, Homo Sapiens
  misc_feature 55, 83: n = A,T,C or G
gggcgaattgggccctctacagcatgctcgagcggccgccagtgtgatggatatntgcagaattccagcacactggcggccgnt

SEQ ID NO: 1003 - DNA, 110 bp, Homo Sapiens
  misc_feature 55, 68, 89, 96, 108, 109, 110: n = A,T,C or G
ggcgaattgggccctctagatgcatgctcgagcggccgccagtgtgatggatatntgcagaattccantcacacctggcggccgctcgngcatgcntctagagggccnnn

SEQ ID NO: 1004 - DNA, 85 bp, Homo Sapiens
  misc_feature 51, 83: n = A,T,C or G
aattgggccctctagatgcatgctcgagcggccgccagtgtgatggatatntgcagaattccagcacactggcggccgctcgngc

SEQ ID NO: 1005 - DNA, 189 bp, Homo Sapiens
gaattgggccctctagctgcatgctcgagcggccgccagtgtgatggatatctgcagaattcggcttgttttcgcaggactaagtactaagcattgtttatggcaggcatcgatgagcttaaatcatgaaacaggaggaaaagtgtaaaaggacaatggaagagagttactgggtggaaaaaaaaaaaa

SEQ ID NO: 1006 - DNA, 91 bp, Homo Sapiens
tagggcgaattgggccctctagcatgcatgctcgagcggccgccagtgtgatggatatctgcaaagccgaattccagcacactggcggccg

SEQ ID NO: 1007 - DNA, 112 bp, Homo Sapiens
  misc_feature 92, 104, 109, 112: n = A,T,C or G
ggcgattgggccctctagagcatgctcgagcggccgccagtgtgatggatatctgcagaattccagcacactggcggccgctcgagcatgcntctagagggccnccaangtn

SEQ ID NO: 1008 - DNA, 92 bp, Homo Sapiens
  misc_feature 85, 89, 92: n = A,T,C or G
tagggcgatttgggccctctagcatgcatgctcgagcggccgccagtgtgatggatatctgcagaattcggcttttttttttttncccnagn

SEQ ID NO: 1009 - DNA, 91 bp, Homo Sapiens
  misc_feature 3, 52: n = A,T,C or G
ganttgggccctctagatgcatgctcgagcggccgccagtgtgatggatatntgcagaattccagcacactggcggccgctcgagcatgca

SEQ ID NO: 1010 - DNA, 103 bp, Homo Sapiens
  misc_feature 2, 83, 90, 97, 102, 103: n = A,T,C or G
anttgggccctctagatgcatgctcgagcggccgccagtgtgatggatatctgcagaattccagcacactggcggccgctcgngcatgcntctaganggccnn

SEQ ID NO: 1011 - DNA, 78 bp, Homo Sapiens
  misc_feature 3: n = A,T,C or G
tanatgcatgctcgagcggccgccagtgtgatggatatctgcagaattccagcacactggcggccgctcgagccggcc

SEQ ID NO: 1012 - DNA, 214 bp, Homo Sapiens
  misc_feature 157, 162, 167, 179, 200, 208: n = A,T,C or G
ggcgaattgggccctctagctgcatgctcgagcggccgccagtgtgatggatatctgcagaattcggcttgttttcgcagccctggttagaagtgggagggaagaggtcaggtcctcaagaggaagaggaagcaaaaaaaagaaagaaggaccttgncaganctganatagggcttggncaagagggaaaaaaaaaaaancccaattnccaccc

SEQ ID NO: 1013 - DNA, 111 bp, Homo Sapiens
  misc_feature 89, 108, 109, 111: n = A,T,C or G
agggcgaattgggccctctagatgcatgctcgagcggccgccagtgtgatggatatctgcagaattccagcacactggcggccgctcgngcatgcttctagagggccnncn

SEQ ID NO: 1014 - DNA, 186 bp, Homo Sapiens
  misc_feature 180, 184, 186: n = A,T,C or G
agcatgcatgctcgagcggccgccagtgtgatggatatttgcagaattcggcttgttttcgcagtagggaggtgatttggtttagagtagtggcaatgagaatggttagaattagatagattcaagatctcagaatcagtaggacttggtcattgattgggcatgggaaaaaaaaaaaangccnan

SEQ ID NO: 1015 - DNA, 194 bp, Homo Sapiens
  misc_feature 193: n = A,T,C or G
aattgggccctctagctgcatgctcgagcggccgccagtgtgatggatatctgcagaattcggcttgttttcgcagtagggaggtgatttggtttagagtagtggcaatgagaatggttagaattagatagattcaagatctcagaatcagtaggacttggtcattgattgggcatgggaaaaaaaaaaaaanc

SEQ ID NO: 1016 - DNA, 153 bp, Homo Sapiens
  misc_feature 103, 108: n = A,T,C or G
tagggcgaattgggccctctagcatgcatgctcgagcggccgccagtgtgatggatatctgcagaattagccgaattccagcacactggcggccgctcgtgcnggctncgagctcggtaccaagcttggcgtaatcatggtcatagctgtttc

SEQ ID NO: 1017 - DNA, 149 bp, Homo Sapiens
  misc_feature 105, 107: n = A,T,C or G
agggcgaattgggccctctagatgcatgctcgagcggccgccagtgtgatggatatctgcagaattaagccgaattccagcacactggcggccgctcgtgctggntncgagctcggtaccaagcttggcgtaatcatggtcatagctgt

SEQ ID NO: 1018 - DNA, 166 bp, Homo Sapiens
  misc_feature 157, 160, 166: n = A,T,C or G
gcgaattgggccctctagctgcatgctcgagcggccgccagtgtgatggatatctgcagaattcggcttggaaccaatgggaaggagcctgagctgccggaaccaatcaaggaaatcatgaaagagattgtagatagggtaaaaaaaaaaaaagccnganttccan

SEQ ID NO: 1019 - DNA, 78 bp, Homo Sapiens
  misc_feature 73, 76, 78: n = A,T,C or G
gggcgaattgggccctctagatgcatgctcgagcggccgccagtgtgatggatatctgcagaattccagctcnctncn

SEQ ID NO: 1020 - DNA, 102 bp, Homo Sapiens
  misc_feature 9: n = A,T,C or G
tagggcganttgggccctctagatgcatgctcgagcggccgccagtgtgatggatatctgcagaattcggcttaattccagcacactggcggccgctcgtgc

SEQ ID NO: 1021 - DNA, 166 bp, Homo Sapiens
  misc_feature 162: n = A,T,C or G
agggcgaattgggccctctagcatgcatgctcgagcggccgccagtgtgatggatatctgcagaattcggcttggaaccaatcattcagagtgctttttttggtaaggcattattttttaatgcaggtatgccactactgggtaaaaaaaaaaaaagccganttcc

SEQ ID NO: 1022 - DNA, 202 bp, Homo Sapiens
agggcgaattgggccctctagatgcatgctcgagcggccgccagtgtgatggatatctgcagaattcggcttagtcaccaattcgtacagactctattttaactctgagattggttccaagccgaattccagcacactggcggccgttacgtagtggatccgagctcggtaccaagcttggcgtaatcatggtcatagctgt

SEQ ID NO: 1023 - DNA, 80 bp, Homo Sapiens
  misc_feature 74, 77, 80: n = A,T,C or G
gggcgaattgggccctctagcatgcatgctcgagcggccgccagtgtgatggatatctgcagaattccagctcnctncan

SEQ ID NO: 1024 - DNA, 155 bp, Homo Sapiens
  misc_feature 153: n = A,T,C or G
aattgggccctctagcagcatgctcgagcggccgccagtgtgatggatatctgcagaattcggcttgagtaagtcaccaattcgtacagactctattttaactctgagattggttccaagccgaattccagcacactggcggccgctcgtgcngg

SEQ ID NO: 1025 - DNA, 139 bp, Homo Sapiens
  misc_feature 54, 93, 94, 107, 108: n = A,T,C or G
ggcgaattgggccctctagagcatgctcgagcggccgccagtgtgatggatatntgcagaattaattccagcacactggcggccgctcgtgcnngcttcgagctcgnnaccaagcttggcgtaatcatggtcatagctg

SEQ ID NO: 1026 - DNA, 80 bp, Homo Sapiens
ctagatgcatgctcgagcggccgccagtgtgatggatatctgcagaattcggcttaattccagcacactggcggccgctc

SEQ ID NO: 1027 - DNA, 245 bp, Homo Sapiens
  misc_feature 106, 116, 129, 131, 147, 193, 209, 231: n = A,T,C or G
ccctctagagcatgctcgagcggccgccagtgtgatggatatctgcagaattatttttttttttaccatggcaaaagcagtttttttaagcttagtcaagttgaancagcgggagnggaggaggatcananaaacctctgtagttgngattggttccaagccgaattccagcacactggcggccgttactagnggatccgagctcggtnccaagcttggcgtaatcatggncatagctgtttcct

SEQ ID NO: 1028 - DNA, 125 bp, Homo Sapiens
  misc_feature 73, 87, 92, 104, 110, 120, 122, 125: n = A,T,C or G
ccctctagatgcatgctcgagcggccgccagtgtgatggatatctgcagaattcggctttttttttttttacnccacagcctacatnaattnttaccatcccancagtanattacataancngan

SEQ ID NO: 1029 - DNA, 98 bp, Homo Sapiens
  misc_feature 93, 94, 98: n = A,T,C or G
ggcgaattgggccctctagagcatgctcgagcggccgccagtgtgatggatatctgcagaattaattccagcacactggcggccgctcgtgcnngctn

SEQ ID NO: 1030 - DNA, 105 bp, Homo Sapiens
  misc_feature 97, 100, 105: n = A,T,C or G
agggcgaattgggccctctagatgcatgctcgagcggccgccagtgtgatggatatctgcagaattaagccgaattccagcacactggcggccgctngtnctggn

SEQ ID NO: 1031 - DNA, 213 bp, Homo Sapiens
  misc_feature 187, 194: n = A,T,C or G
ccctctagatgcatgctcgagcggccgccagtgtgatggatatctgcagaattcggcttggaaccaatcaaatctgggtcaaaactcggattctgtcacttctatgccgtgactttgggcaagttccttgacctctccaagcccctgttttcccacctgtaaaaaaaaaaaaagccgaattccagcncactggnggccgttactaggggatcc

SEQ ID NO: 1032 - DNA, 153 bp, Homo Sapiens
  misc_feature 152: n = A,T,C or G
ggcgaattgggccctctagctgcatgctcgagcggccgccagtgtgatggatatctgcagaattcggcttggaaccaatctcagagttaaaatagagtctgtacgaattggtgacttactcgatgtagagggtaaaaaaaaaaaaagccgant

SEQ ID NO: 1033 - DNA, 330 bp, Homo Sapiens
  misc_feature 280, 297: n = A,T,C or G
ggcgaattgggccctctagcagcatgctcgagcggccgccagtgtgatggatatctgcagaattcggcttggaaccaatctcagagttaaaatagagtctgtacgaattggtgacttactcgatgtagagtttttttctttaccagtatgtgattggcataacagcaacacatcgaagtgtcaaaagtgtaactctcctgccaagtgaattacctcaatttcctgtaactgctcctgattggttccaagccgaattccagcacactggcggccgctcgtnctggctccgagctcggnaccaagcttggcgtaatcatggtcatagctgtt

SEQ ID NO: 1034 - DNA, 161 bp, Homo Sapiens
  misc_feature 11, 102, 113, 138: n = A,T,C or G
tatagggcganttgggccctctagccatgcatgctcgagcggccgccagtgtgatggatatctgcagaattcggcttaattccagcacactggcggccgctncggtagctggntccgagctcggtaccaagcttggcngtaatcatggtcatagctgtttc

SEQ ID NO: 1035 - DNA, 200 bp, Homo Sapiens
  misc_feature 185, 191, 196, 200: n = A,T,C or G
gcgaattgggccctctagcatgcatgctcgagcggccgccagtgtgatggatatctgcagaattcggcttggaaccaatgggaaggagtctgagctgctggaaccaatcattcagagtgctttttttggtaaggcattattttttaatgcaggtatgccacctactgggtaaaaaaaaaaaaaancccctntgaangatn

SEQ ID NO: 1036 - DNA, 142 bp, Homo Sapiens
  misc_feature 94: n = A,T,C or G
gggcgaattgggccctctagatgcatgctcgagcggccgccagtgtgatggatatctgcagaattaattccagcacactggcggccgttactantggatccgagctcggtaccaagcttggcgtaatcatggtcatagctgt

SEQ ID NO: 1037 - DNA, 133 bp, Homo Sapiens
  misc_feature 128, 131, 133: n = A,T,C or G
gaattgggccctctagcatgcatgctcgagcggccgccagtgtgatggatatctgcagaattcggcttggaaccaatcctactaataaaccagttctgaaggtaaaaaaaaaaaaaaaaaaaaaaagnccnan

SEQ ID NO: 1038 - DNA, 145 bp, Homo Sapiens
  misc_feature 138, 144, 145: n = A,T,C or G
agggcgaattgggccctctagctgcatgctcgagcggccgccagtgtgatggatatctgcagaattcggcttggaaccaatcagtatcttgtcaatatagtcagccgatcgatcgaaaaaaaaaaaaaaaaccatttntttaann

SEQ ID NO: 1039 - DNA, 224 bp, Homo Sapiens
  misc_feature 167, 171: n = A,T,C or G
ccctctagcatgcatgctcgagcggccgccagtgtgatggatatctgcagaattcggcttggaaccaatcagtaattttaaggttttgtttgttctaaatgtaagagttcagactcacattctattaaaatttagcaagccgaattccagcacactggcggccgctnctantggatccgagctcggtaccaagcttggcgtaatcatggtcatagctgtttcct

SEQ ID NO: 1040 - DNA, 181 bp, Homo Sapiens
  misc_feature 162, 170, 173, 180, 181: n = A,T,C or G
ccctctagatgcatgctcgagcggccgccagtgtgatggatatctgcagaattcggcttggaaccaatcagtaattttaaggttttgtttgttctaaatgtaagagttcagactcacattctattaaaatttagcccgaaaaaaaaaaaaaaaaaaaaaagnccggattnccnccccccnn

SEQ ID NO: 1041 - DNA, 113 bp, Homo Sapiens
ttggaaccaatcccagcactttgggaggccaaggcaggtggatcacttgaggtcaggagttcaggaccagcctggccaacatggtgaaaccccgtctgtacgaaaaaaaaaaa

SEQ ID NO: 1042 - DNA, 108 bp, Homo Sapiens
ttggaaccaatcctgacaatgctgaacgtaaatatcatttaaaatatgtattcagttgtaaataatataaaatattatatatattgtttagcctacgaaaaaaaaaaa

SEQ ID NO: 1043 - DNA, 38 bp, Homo Sapiens
  misc_feature 17, 20, 30, 33, 38: n = A,T,C or G
tttttttttttttcgancanacggggtttnacnatgtn

SEQ ID NO: 1044 - DNA, 113 bp, Homo Sapiens; identical to SEQ ID NO: 1041

SEQ ID NO: 1045 - DNA, 65 bp, Homo Sapiens
ttggaaccaatcacaactacagaggtttctctgatcctcctccactcccgctgcttcaacttgac

SEQ ID NO: 1046 - DNA, 106 bp, Homo Sapiens
  misc_feature 15, 19, 29, 49, 66, 70, 97, 103, 106: n = A,T,C or G
ttttttttttttcgnacanacggggtttnaccatgttggccaggctggncctgaactcctgacctnaagngatccacctgccttggcctcccaaagngctggnatn

SEQ ID NO: 1047 - DNA, 83 bp, Homo Sapiens
  misc_feature 75, 77, 83: n = A,T,C or G
ttggaaccaatcagtatcttgtcaatatagtcagccgatcgatcgaaaaaaaaaaaaaaaaccatttctttaaanantttttn

SEQ ID NO: 1048 - DNA, 28 bp, Homo Sapiens
tgcaattgtacaggcaagtcttgattgg

SEQ ID NO: 1049 - DNA, 28 bp, Homo Sapiens
  misc_feature 21, 24, 28: n = A,T,C or G
agcacactggcggccgctcgngcntgcn

SEQ ID NO: 1050 - DNA, 47 bp, Homo Sapiens
  misc_feature 17, 20, 30, 38, 40, 47: n = A,T,C or G
tttttttttttttcgancanacggggtttnaccatgtngnccaggcn

SEQ ID NO: 1051 - DNA, 17 bp, Homo Sapiens
ttaaaattactgattgg

SEQ ID NO: 1052 - DNA, 65 bp, Homo Sapiens; identical to SEQ ID NO: 1045

SEQ ID NO: 1053 - DNA, 22 bp, Homo Sapiens
  misc_feature 15, 21, 22: n = A,T,C or G
ttggaaccaatcctntttgann

SEQ ID NO: 1054 - DNA, 62 bp, Homo Sapiens
ttggaaccaatcacaactacagaggtttctctgatcctcctccactcccgctgcttcaactt

SEQ ID NO: 1055 - DNA, 104 bp, Homo Sapiens
  misc_feature 100, 102, 104: n = A,T,C or G
ttggaaccaatcaccaaaaactctggtaacagaattaggatatcctcttgagaagagggccttaatgaccttttatgtgaaaaaaaaaaaaaaaaaccgntncn

SEQ ID NO: 1056 - DNA, 135 bp, Homo Sapiens
  misc_feature 54, 61, 74, 83, 103, 105, 127, 130, 135: n = A,T,C or G
ttggaaccaatcctactaataaaccagttctgaaggtgaaaaaaaaaaaccaancaaaaanggaaatgtcatgngaggttaanccagtttgcattcccctaangngaaaaaaaaaaaaaaccatttnttnaaaan

SEQ ID NO: 1057 - DNA, 32 bp, Homo Sapiens
  misc_feature 14, 27, 28, 32: n = A,T,C or G
ttggaaccaatcancataatgtgctgnntacn

SEQ ID NO: 1058 - DNA, 104 bp, Homo Sapiens
ttggaaccaatcctaaagaatattcttacatataataaagaattcccatttgatgttcagcctgtcccattaagaattttggcacctggtgaaaaaaaaaaaaa

SEQ ID NO: 1059 - DNA, 25 bp, Homo Sapiens
ttggaaccaatcaataaagagactt

SEQ ID NO: 1060 - DNA, 42 bp, Homo Sapiens
  misc_feature 26, 36, 41, 42: n = A,T,C or G
tcagcacactggcggccgctcgtgcntgcttcgagngggcnn

SEQ ID NO: 1061 - DNA, 116 bp, Homo Sapiens
ttggaaccaatcagctggttatgggaattcagaagcagattgacaacatgaaaggcaagctccaagagacccaggacagggcaaaacgacaagaggatctcatcatgaaaaaaaaa

SEQ ID NO: 1062 - DNA, 124 bp, Homo Sapiens
ttggaaccaatcatactagatcaatctatttattattttatcacaagctgatatctttgatttataattagaaccatatttaactttagtccattcatatagaataagtggtgaaaaaaaaaaa

SEQ ID NO: 1063 - DNA, 123 bp, Homo Sapiens
ttggaaccaatcatactagatcaatctatttattattttatcacaagctgatatctttgatttataattagaaccatatttaactttagtccattcatatagaataagtggtgaaaaaaaaaa

SEQ ID NO: 1064 - DNA, 143 bp, Homo Sapiens
  misc_feature 33: n = A,T,C or G
ttggaaccaatcagctggttatgggtattcagntaacagtgaaagaagagacttattgcaaagcaaaaagtacacactcaagaaaggggagttcgggcatacccgacagagaacaatgggttctggggtttcatcttgattgg

SEQ ID NO: 1065 - DNA, 78 bp, Homo Sapiens
  misc_feature 42, 55, 64, 75, 77, 78: n = A,T,C or G
agcacactggcggccgctcgagcatgcatctagagggcccanttcgccctatagngagtcgtantacaatgtcancnn

SEQ ID NO: 1066 - DNA, 127 bp, Homo Sapiens
tttacaacgagggagtactacagccctaccagaaaggctaatatttatttacttatttagagacaaggtcttggccctgtcacccagggtggatggagtacagagcgagattccgtctcaaaaaaaa

SEQ ID NO: 1067 - DNA, 137 bp, Homo Sapiens
  misc_feature 81, 85, 104, 112, 135, 136, 137: n = A,T,C or G
ttggaaccaatcagtatcttgtcaatatagtcagccgatcgatcaagccgaattccagcacactggcggccgctcgtgctngctncgagcgggcccccaacgtnggcgtgancgtggtcatagctgtttcctgannn

SEQ ID NO: 1068 - DNA, 75 bp, Homo Sapiens
  misc_feature 66, 70, 75: n = A,T,C or G
ttggaaccaatcctactaataaaccagttctgaaggtgaaaaaaaaaaaaaaaccatttctttaangatnttttn

SEQ ID NO: 1069 - DNA, 136 bp, Homo Sapiens
  misc_feature 72, 77, 83, 87, 106, 116, 130, 135, 136: n = A,T,C or G
ttggaaccaatccgtaatctaaatggacattcaattgggcaatatagaatacatgctgaaaaaaaaaaaaanccganttccancccnctggcgggccgttcgtgcnggctccgggngggcccccaacctnggggnn

SEQ ID NO: 1070 - DNA, 42 bp, Homo Sapiens
ttggaaccaatcagtatcttgtcaatatagtcagccgatcga

SEQ ID NO: 1071 - DNA, 95 bp, Homo Sapiens
  misc_feature 79, 86, 92, 95: n = A,T,C or G
ttggaaccaatccacgacatcagcaggctcacaagaacttcaacgcgtgcggtcacttggcctgaaaaaaaaaaaaaancatttcnttaaanatn

SEQ ID NO: 1072 - DNA, 64 bp, Homo Sapiens
  misc_feature 46, 50: n = A,T,C or G
aaccaatcgtatgaaaattccagcacactggcggccgctcgtgctngctncgagcgggccccca

SEQ ID NO: 1073 - DNA, 47 bp, Homo Sapiens
ttggaaccaatcctactaataaaccagttctgaaggtgaaaaaaaaa

SEQ ID NO: 1074 - DNA, 78 bp, Homo Sapiens
  misc_feature 65, 70, 76, 78: n = A,T,C or G
ttggaaccaatcagtatcttgtcaatatagtcagccgatcgatcgacctgaaaaaaaaaaaaaantaaancttcantn

SEQ ID NO: 1075 - DNA, 37 bp, Homo Sapiens
  misc_feature 30, 35, 37: n = A,T,C or G
aattccagcacactggcggccgctcgtgcntgctncn

SEQ ID NO: 1076 - DNA, 59 bp, Homo Sapiens
ttggaaccaatcagtatcttgtcaatatagtcagccgatcgatcgacctgaaaaaaaaa

SEQ ID NO: 1077 - DNA, 60 bp, Homo Sapiens
  misc_feature 53, 58, 60: n = A,T,C or G
ttggaaccaatcctactaataaaccagttctgaaggtgaaaaaaaaaaaaaancattncn

SEQ ID NO: 1078 - DNA, 37 bp, Homo Sapiens
ttggaaccaatctagtgagtctgatgtcgtggattgg

SEQ ID NO: 1079 - DNA, 110 bp, Homo Sapiens
  misc_feature 70, 79, 84, 103, 106, 110: n = A,T,C or G
ttggaaccaatcagtatcttgtcaatatagtcagccgatcgatcgacctgaaaaaaaaataaaaaattcnttaaagatnttttngggggaaaaaaaaaaaagnccnattn

SEQ ID NO: 1080 - DNA, 65 bp, Homo Sapiens
  misc_feature 59, 61, 65: n = A,T,C or G
ttggaaccaatctatcaccctatagaagaactaatgttagtatgaaaaaaaaaaaaacngntttn

SEQ ID NO: 1081 - DNA, 81 bp, Homo Sapiens
  misc_feature 48, 53, 75, 78, 81: n = A,T,C or G
ttggaaccaatccacgacatcagctgaaaaaaaaaaaaaaaaaaaaanggggncctgaaaaaaaaaaaagcccanttnccn

SEQ ID NO: 1082 - DNA, 45 bp, Homo Sapiens
  misc_feature 34, 38, 44, 45: n = A,T,C or G
ttaattccagcacactggcaggccgctcgtgcangctncgagcnn

SEQ ID NO: 1083 - DNA, 79 bp, Homo Sapiens
  misc_feature 65, 76, 77, 79: n = A,T,C or G
ttggaaccaatcagtatcttgtcaatatagtcagccgatcgatcgacctgaaaaaaaaaaaaaanaaaaagggaanngn

SEQ ID NO: 1084 - DNA, 46 bp, Homo Sapiens
  misc_feature 27, 30, 40, 42: n = A,T,C or G
aattccagcacactggcggccgctcgngcntgcttctagngngccc

SEQ ID NO: 1085 - DNA, 72 bp, Homo Sapiens
  misc_feature 69, 70, 72: n = A,T,C or G
ttggaaccaatctggaaaggtacccataatattgagtgaaaaaaaaaaaaaaccaaccaaaaagggaanngn

SEQ ID NO: 1086 - DNA, 54 bp, Homo Sapiens
ttggaaccaatcaaaaataataacaacttttcaagacctagtgaaaaaaaaaaa

SEQ ID NO: 1087 - DNA, 112 bp, Homo Sapiens
  misc_feature 92, 103, 111, 112: n = A,T,C or G
ttggaaccaatccccaactaatacagtggaaccaatcctactaataaaccagttctgaaggtgaaaaaagaatccagcacactggcggccgntccgtgctggntccgagcnn

SEQ ID NO: 1088 - DNA, 42 bp, Homo Sapiens
  misc_feature 27, 34, 40, 42: n = A,T,C or G
aattccagcacactggcggccgctcgngcatgcntctagngn

SEQ ID NO: 1089 - DNA, 61 bp, Homo Sapiens
  misc_feature 55, 57, 61: n = A,T,C or G
ttggaaccaatccacgacgtgcagtcacttggcctatgaaaaaaaaaaaaaaaantntgcn

SEQ ID NO: 1090 - DNA, 86 bp, Homo Sapiens
  misc_feature 57, 60, 69, 82, 83, 86: n = A,T,C or G
ttggaaccaatcccactaataaaccagttctgaaggtgaaaaaaaaaaaaaaaaaangtntgcttgatnaaaaaaaaaaaannccn

SEQ ID NO: 1091 - DNA, 50 bp, Homo Sapiens
  misc_feature 45, 46, 50: n = A,T,C or G
ttggaaccaatccacaattccagcacactggcggccgctcgtgcnngctn

SEQ ID NO: 1092 - DNA, 34 bp, Homo Sapiens
  misc_feature 27, 30, 34: n = A,T,C or G
aattccagcacactggcggccgctcgngcntgcn

SEQ ID NO: 1093 - DNA, 76 bp, Homo Sapiens
  misc_feature 74, 75, 76: n = A,T,C or G
ttggaaccaatcctactaataaaccagttctgaagggtggattggttccaagccgaattccagccgcactgccnnn

SEQ ID NO: 1094 - DNA, 45 bp, Homo Sapiens
ttggaaccaatcctactaataaaccagttctgaaggtgaaaaaaa

SEQ ID NO: 1095 - DNA, 49 bp, Homo Sapiens
ttggaaccaatcctactaataaaccagttctgaaggtgaaaaaaaaaaa

SEQ ID NO: 1096 - DNA, 60 bp, Homo Sapiens
  misc_feature 54, 55, 60: n = A,T,C or G
ttggaaccaatcctactaataaaccagttcttttttttttttaaccttcaaaannggttn

SEQ ID NO: 1097 - DNA, 65 bp, Homo Sapiens
  misc_feature 57, 62, 65: n = A,T,C or G
ttggaaccaatcctactaataaaccagttctgaaggtgaaaaaaaaaaaaaaaggtntgctngan

SEQ ID NO: 1098 - DNA, 49 bp, Homo Sapiens; identical to SEQ ID NO: 1095

SEQ ID NO: 1099 - DNA, 193 bp, Homo Sapiens
  misc_feature 187, 188, 193: n = A,T,C or G
ttaaactccgtcacaaaaacaaacgaaaagaagtaaagcactatacaatcctatttaaatctaacagatgttataatgatctctagctactcaggagactgaagtgtgagaacaccctgagcccaggaatacaaggccagcctgggcaacacagcaagaccccatccctgaaaaaaaaaaaaaaaanngggtn

SEQ ID NO: 1100 - DNA, 181 bp, Homo Sapiens
ttaaactccgtcacaaaaacaaacgaaaagaagtaaagcactatacaatcctatttaaatctaacagatgttataatgatctctagctactcaggagactgaagtgtgagaacaccctgagcccaggaatacaaggccagcctgggcaacacagcaagaccccatccctgaaaaaaaaaaa

SEQ ID NO: 1101 - DNA, 188 bp, Homo Sapiens
  misc_feature 185, 187, 188: n = A,T,C or G
ttaaactccgtcacaaaaacaaacgaaaagaagtaaagcactatacaatcctatttaaatctaacagatgttataatgatctctagcctactcaggggactgaagtgtgagaacaccctgagcccaggaatacaaggccagcctgggcaacacagcaagaccccatccctgaaaaaaaaaaaaangnn

SEQ ID NO: 1102 - DNA, 181 bp, Homo Sapiens; identical to SEQ ID NO: 1100

SEQ ID NO: 1103 - DNA, 33 bp, Homo Sapiens
  misc_feature 15, 20, 27, 30, 33: n = A,T,C or G
ttttttttttttttnaaggnagggggnctngcn

SEQ ID NO: 1104 - DNA, 176 bp, Homo Sapiens
ttaaactccgtctcaaaaacaaaacaaaacaaaaatgagtccttggtaactagaatattcggttcccagggttacagtatctagatagtaaataattcagggaagttagtggtaagagatttcttgatcatttctactgagaattttatttaacaagcattccttatgaaaaaaaa

SEQ ID NO: 1105 - DNA, 182 bp, Homo Sapiens
ttaaactccgtcacaaaaacaaacgaaaagaagtaaagcactatacaatcctatttaaatctaacagatgttataatgatctctagctacctcaggagactgaagtgtgagaacaccctgagcccaggaatacaaggccagcctgggcaacacagcaagaccccatccctgaaaaaaaaaaa

SEQ ID NO: 1106 - DNA, 116 bp, Homo Sapiens
ttaaactccgtcctatgaaaaagtgattaatatcattgtgctcattagtctttccaaggggaagataacttttatcccacagttgttattaaaacattatctatattggacggagt

SEQ ID NO: 1107 - DNA, 117 bp, Homo Sapiens
ttaaactccgtctcaaaacaaacaaaatcccagcgtagtggctcccgcctgtaatcccagctactcaggagactagcctgggcaacacagggagaacctgtctctgaaaaaaaaaaa

SEQ ID NO: 1108 - DNA, 182 bp, Homo Sapiens
ttaaactccgtcacaaaaacaagcgaaaagaagtaaagcactatacaatcctatttaaatctaacagatgttataatgatctctagctactcaggaggctgctagtgtgagaacaccctgagcccaggaatacaaggccagcctgggcaacacagcaagaccccatccctgaaaaaaaaaaa

SEQ ID NO: 1109 - DNA, 150 bp, Homo Sapiens
ttaaactccgtccaatatagataatgttttaataacaactgtgggataaaagttatcttccccttggaaagactaatgagcacaatgatattaatcacttttatggtgaataataaatgcaataattgcctcatgggtgaaaaaaaaaaa

SEQ ID NO: 1110 - DNA, 196 bp, Homo Sapiens
ttaaactccgtccatgcatataccaacacaaaataaccaattcagttttcccgaattcagaggcttgaatagtcctgcagctgtggtgtcctcacacttcagtctcctgagtagctagagatcattataacatctgttagatttaaataggattgtatagtgctttacttcttttcgtttgtttttgtgacggagt

SEQ ID NO: 1111 - DNA, 163 bp, Homo Sapiens
  misc_feature 154, 155, 163: n = A,T,C or G
ttaaactccgtccaatatagataatgttttaataacaactgtgggataaaagttatcttccccttggaaagactaatgagcacaatgatattaatcaccttttatggtgaataataaatgcaataattgcctcatgggtgaaaaaaaaaaaaanncctttttn

SEQ ID NO: 1112 - DNA, 164 bp, Homo Sapiens
ttaaactccgtctcaaaaaacaacaaatttcggccgggcacggtggcctcacgcctgtaatcccagcactttgggaggctgaggtgggtggatcacttgaggttaagagttcgagtccagcctggccaacgtggtgaaaccccgtctctactgaaaaaaaaaaa

SEQ ID NO: 1113 - DNA, 338 bp, Homo Sapiens
  misc_feature 183, 209, 216, 221, 237, 247, 250, 257, 268, 275, 281, 307,314, 334, 335, 338: n = A,T,C or G
ttaaactccgtcacaaaaacaaacgaaaagaagtaaagcactatacaatcctatttaaatctaacagatgttataatgatctctagctactcaggagactgaagtgtgagaacaccctgagcccaggaatacaaggccagcctgggcaacacagcaagaccccatccctgaaaaaaaaaaaanaaaaaccccaaccttacggccgggcncgggggntcacncctgtaatcccagcantttgggaggntgnggggggnggatcacttgnggttaanagttcnagtccagcctggccaacggggggaanccccgtntttactgaaaaaaaaaaaannccn

SEQ ID NO: 1114 - DNA, 68 bp, Homo Sapiens
  misc_feature 60, 61: n = A,T,C or G
ttaaactccgtcacaaaaacaaacgaaaagaagtaaagcactatacaatcctatttaaanntaacaga

SEQ ID NO: 1115 - DNA, 55 bp, Homo Sapiens
ttaaactccgtctgtcccacagttgttattaaaacattatctatattggacggag

SEQ ID NO: 1116 - DNA, 41 bp, Homo Sapiens
  misc_feature 31: n = A,T,C or G
tcagcacactggcggccgctcgtgcaggctncgagctcggc

SEQ ID NO: 1117 - DNA, 171 bp, Homo Sapiens
  misc_feature 86, 146, 166, 167, 171: n = A,T,C or G
ttaaactccgtctcaaaaaaaaaagaagaaggtggatctccaaccaggccagagaagattctcacagaaggttttgaacttctaanaaataaattggtttggtaataaaatggcttctggtcggaaaaaaaaaaaagggggggggnaaaaaaaaaaaaaaaaaaanncccn

SEQ ID NO: 1118 - DNA, 40 bp, Homo Sapiens
  misc_feature 33, 35, 40: n = A,T,C or G
ttaaactccgtcccaaaggaaaaaaaaaaaaangnccaan

SEQ ID NO: 1119 - DNA, 35 bp, Homo Sapiens
ttagttgttattaaaacattatctatattggacgg

SEQ ID NO: 1120 - DNA, 74 bp, Homo Sapiens
  misc_feature 31, 38, 41, 57, 61, 67, 72, 74: n = A,T,C or G
ttaaactccgtcggaaaaaaaaaaaaaaaanggggggntgnggaaaaaaaaaaaagnccantttccnccccntn

SEQ ID NO: 1121 - DNA, 169 bp, Homo Sapiens
ttcctgggatggggtcttgctgtgttgcccaggctggccttgtattcctgggctcagggtgttctcacactgcagtctcctgagtagctagagatcattataacatctgttagatttaaataggattgtatagtgctttacttcttttcgtttgtttttgtgacggagt

SEQ ID NO: 1122 - DNA, 36 bp, Homo Sapiens
  misc_feature 27, 31: n = A,T,C or G
tcagcacactggcggccgctcgtgctngctncgaga

SEQ ID NO: 1123 - DNA, 51 bp, Homo Sapiens
  misc_feature 33, 38, 48, 49, 51: n = A,T,C or G
ttaaactccgtccccttttttttttttccccangaggnaattatggcnntn

SEQ ID NO: 1124 - DNA, 143 bp, Homo Sapiens
  misc_feature 124, 136, 139, 143: n = A,T,C or G
ttaaactccgtccaaaagaaaaagcataacccctagggttgcacataataacaaattccagagggaacatagtgaggtgtatacaatgaacgcataaactactgcggggaaaaaaaaaaaaaangtttttttgttnaantttn

SEQ ID NO: 1125 - DNA, 57 bp, Homo Sapiens
  misc_feature 40: n = A,T,C or G
ttaaactccgtccaatatagataatgttttaataacaacntgtgggaaaaaaaaaaa

SEQ ID NO: 1126 - DNA, 47 bp, Homo Sapiens
  misc_feature 27, 38, 45, 47: n = A,T,C or G
aattccagcacactggcggccgctcgngcttgcttctnttctcgntn

SEQ ID NO: 1127 - DNA, 38 bp, Homo Sapiens
  misc_feature 9, 18, 20, 32, 34, 38: n = A,T,C or G
ttttttttnttttaccanantcaaatgccaantnccan

SEQ ID NO: 1128 - DNA, 35 bp, Homo Sapiens
  misc_feature 27, 30, 35: n = A,T,C or G
aattccagcacactggcggccgctcgngcntgctn

SEQ ID NO: 1129 - DNA, 41 bp, Homo Sapiens
  misc_feature 27, 37, 40, 41: n = A,T,C or G
aattccagcacactggcggccgctcgngcatgcttcnagnn

SEQ ID NO: 1130 - DNA, 261 bp, Homo Sapiens
  misc_feature 192, 198, 208, 213, 223, 226, 246, 250, 257, 260, 261: n = A,T,C or G
tttcgatacagggaagatagttttcttacaagtagtttggtaatattttttttcttaagttgtacatttgactcagctgtcaaatttctcacacttgtatatatctacacacaacctaagttaaaatgttgatgtgagttttatttcacatggatggaataaacttgtggttgtcctgtaaaaaaaaaaaangccganttccagcccnctggnggccgctcgngcnggctccgagctgggccccangctnggccaantcnn

SEQ ID NO: 1131 - DNA, 78 bp, Homo Sapiens
  misc_feature 19, 26, 38, 39, 53, 57, 63, 71, 76, 78: n = A,T,C or G
tttttttttttttacctgnatcaaangccaaattccannacactggcggccgntcgngcaggntccaagcngggcncn

SEQ ID NO: 1132 - DNA, 86 bp, Homo Sapiens
  misc_feature 13, 14, 49, 50, 75, 84: n = A,T,C or G
ttttttttttttnnccccccccccccttttttttttttttttttttttnnccgggaaaaaatttaagggtttttnaaaaaaaantt

SEQ ID NO: 1133 - DNA, 37 bp, Homo Sapiens
  misc_feature 14, 20, 31, 37: n = A,T,C or G
tttttttttttttnccggtnaaaattttaangttttn

SEQ ID NO: 1134 - DNA, 89 bp, Homo Sapiens
  misc_feature 32, 33, 44, 53, 87, 88, 89: n = A,T,C or G
ttaattccagcacactggcggccgctcgtgcnngcttcgagcgngccaccaancttggcgtaatcatggtcatagctgtttcctgannn

SEQ ID NO: 1135 - DNA, 60 bp, Homo Sapiens
  misc_feature 27, 34, 40, 46, 54, 57, 60: n = A,T,C or G
aattccagcacactggcggccgctcgngcatgcntctagngggccnccaacctnggngtn

SEQ ID NO: 1136 - DNA, 149 bp, Homo Sapiens
tttcgatacaggtgcagggtgggttcaggtgtgtggaaaggtgacctcagagggaaaagagcttctgctagttggacacacaagcctttggtgattgactggcaaagttcagaggtgtccactgtgcccggagttggtaaaaaaaaaaa

SEQ ID NO: 1137 - DNA, 36 bp, Homo Sapiens
  misc_feature 30: n = A,T,C or G
atacaggtaaaaaaaaaaaaaaaaaaaaantaaact

SEQ ID NO: 1138 - DNA, 197 bp, Homo Sapiens
  misc_feature 192, 193, 197: n = A,T,C or G
tttcgatacagggctagtggacatttagaataataattaaagctagagtcttgtatgtcttttctttgaaggagttctaaccttgtaaattgagaatgacttcagagaattttgattaagaaaacattaaaatcttaaccgtaaaaaaaaaaaaaaaaaaaaaaagggggggggggggaaaaaaaaaaaaannccan

SEQ ID NO: 1139 - DNA, 47 bp, Homo Sapiens
ttagactctagctttaattattattctaaatgtccactagccctgta

SEQ ID NO: 1140 - DNA, 42 bp, Homo Sapiens
  misc_feature 39: n = A,T,C or G
ttaattccagcacactggcggccgctcgtgcaggctccnagc

SEQ ID NO: 1141 - DNA, 44 bp, Homo Sapiens
  misc_feature 13, 18, 27, 35, 37, 44: n = A,T,C or G
ttttttttttttnacccnacactgggnctcccccngnatcaaan

SEQ ID NO: 1142 - DNA, 37 bp, Homo Sapiens
  misc_feature 14, 20, 28, 37: n = A,T,C or G
tttttttttttttnccggtnaaaatttnaaggttttn

SEQ ID NO: 1143 - DNA, 294 bp, Homo Sapiens
  misc_feature 259, 265, 273, 285, 287, 294: n = A,T,C or G
tttcgatacaggctctgtcggcaagaaataacatccttaagaatgaaactgcatcaacaggagagagacatggcagaaatgcaaagagtgtggaaagaaaagtttgaacaagcctgaaaaaagaaaacttcaagaaacaaaagagttacagaaagcaggaattatgtttcaaatggacaatcatttaccaaaccttgttaatctgaatgaagatccacaactatctgagatgctgctatatatggtaaaaaaaaaaaangccganttccagcncactggggggcngnttcgtgn

SEQ ID NO: 1144 - DNA, 31 bp, Homo Sapiens
  misc_feature 31: n = A,T,C or G
ttagcacactggcggccgctcgtgctggctn

SEQ ID NO: 1145 - DNA, 241 bp, Homo Sapiens
  misc_feature 226, 232: n = A,T,C or G
tttcgatacaggtaatgtatgtgactagcagattatattagccaggctatctgttgtaaatgctagattgcaaaatatcatttaaggtctgtgtaagaaggagtttagaaggatatttatggaaatcctttctgatgtctctttttgcctctcagctgcttactttgaatgcctggttgtctaataagtctaggaaggtggaggcagaaacagagttataccctgnggtaanaaaaaaaaa

SEQ ID NO: 1146 - DNA, 123 bp, Homo Sapiens
tttcgatacaggtgctaaagttgaacgagctgatggatatgaaccaccagtccaagaatctgtttaaagttcagacttcaaatagtggcaaataaaaagtgctatttgtggtaaaaaaaaaaa

SEQ ID NO: 1147 - DNA, 62 bp, Homo Sapiens
  misc_feature 13, 23, 38, 55, 61: n = A,T,C or G
ttttttttttttnacctgtatcnaaagccaaattccancacacttggcggccgcncgagcng

SEQ ID NO: 1148 - DNA, 240 bp, Homo Sapiens
tttcgatacaggtaatgtatgtgactagcagattatattagccaggctatctgttgtaaatgctagattgcaaaatatcatttaaggtctgtgtaagaaggagtttagaaggatatttatggaaatcctttctgatgtctctttttgcctctcagctgcttactttgaatgcctggttgtctaataagtctaggaaggtggaggcagaaacagagttataccctgtggtaaaaaaaaaaa

SEQ ID NO: 1149 - DNA, 256 bp, Homo Sapiens
tttcgatacaggctctgtcggcaagaaataacatccttaagaatgaaactgcatcaacaggagagagacatggcagaaatgcaaagagtgtggaaagaaaagtttgaacaagctgaaaaaagaaaacttcaagaaacaaaagagttacagaaagcaggaattatgtttcaaatggacaatcatttaccaaaccttgttaatctgaatgaagatccacaactatctgagatgctgctatatatggtaaaaaaaaaaa

SEQ ID NO: 1150 - DNA, 254 bp, Homo Sapiens
tttcgatacaggtacatggttttttattatgtgtgcatctgcttcagtaataggtgtgaattactcatttggatcattaggagtttcaaaatctagttaaatgactagatttgtgttgatgtaaattctgtcattctgaactgcagggattgtcagtaacttaactgcaaactaaactggtgataattatggtaaaattgcaagacgagcaataaatctcaaccaacttgagagaacactggtaaaaaaaaaaa

SEQ ID NO: 1151 - DNA, 189 bp, Homo Sapiens
tttcgatacagggaagatagttttcttacaagtagtttggtaatattttttttcttaagttgtacatttgactcagctgtcaaatttctcacacttgtatatatctacacacaactaagttaaaatgttgatgtgagttttatttcacatggatggaataaacttgtggttgtcctgtaaaaaaaaaaa

SEQ ID NO: 1152 - DNA, 42 bp, Homo Sapiens
  misc_feature 30, 35, 41, 42: n = A,T,C or G
aattccagcacactggcggccgctcgagcntgctnctagcnn

SEQ ID NO: 1153 - DNA, 126 bp, Homo Sapiens
tttcgatacaggtgctaaagttgaacgagctgatggatatgaaccaccagtccaagaatctgtttaaagttcagacttcaaatagtggcaaataaaaagtgctatttgtgatggtaaaaaaaaaaa

SEQ ID NO: 1154 - DNA, 105 bp, Homo Sapiens
tttcgatacaggtgctaaagttgaacgagctgatggatatgaaccaccagtccaagaatctgtttaaagttcagacttcaaatagtggcaaataaaaagtgctat

SEQ ID NO: 1155 - DNA, 209 bp, Homo Sapiens
  misc_feature 192, 200, 203, 209: n = A,T,C or G
tttcgatacagggaagatagttttcttacaagtagtttggtaatattttttttcttaagttgtacatttgactcagctgtcaaatttctcacacttgtatatatctacacacaactaagttaaaatgttgatgtgagttttatttcacatggatggaataaacttgtggttgtcctgtaaaaaaaaaaaatnttaccaanctncttgtn

SEQ ID NO: 1156 - DNA, 189 bp, Homo Sapiens
tttcgatacagggaagatagttttcttacaagtagtttggtaatattttttttcttaagttgtacatttgactcagctgtcaaatttctcacacttgtatatatctacacacaactaagttaaaatgttgatgtgagttttatttcacatgaatggaataaacttgtgattgtcctgtaaaaaaaaaaa

SEQ ID NO: 1157 - DNA, 230 bp, Homo Sapiens
  misc_feature 202, 208, 212, 223, 224, 230: n = A,T,C or G
tttcgatacaggctctaggaagggggtttgttttaatttggagaattggatacagttttttgttaagtggactcagtgtaaatagaagttgaagttaccagaaggaataaattgatgatgctactggactctggagaaaatgagtggttgaagccaagagcactggtagtgttgtatctaggtaaaaaaaaaaaaagccganttccancccnctggcggccgnncgtgcn

SEQ ID NO: 1158 - DNA, 106 bp, Homo Sapiens
tttcgatacaggtgctaaagttgaacgagctgatggatatgaaccaccagtccaagaatctgtttaaagttcagacttcaaatagtggcaaataaaaagtgctatt

SEQ ID NO: 1159 - DNA, 34 bp, Homo Sapiens
  misc_feature 27, 30: n = A,T,C or G
aattccagcacactggcggccgctcgngcntgcc

SEQ ID NO: 1160 - DNA, 38 bp, Homo Sapiens
  misc_feature 24, 37: n = A,T,C or G
aattccagcacactggcggccgcncgagccggctgcnc

SEQ ID NO: 1161 - DNA, 100 bp, Homo Sapiens
tttacaacgaggtcagcccggaatgaaaatgagccagtccaccatgaagataatcaagagcttcttgcattcattccctgtatctgctcaaaaaaaaaaa

SEQ ID NO: 1162 - DNA, 96 bp, Homo Sapiens
tttacaacgaggtataaggaaaccaattttaccacaggctaattgatataaacaagagttaagttcctacagcatatttctggtcaaaaaaaaaaa

SEQ ID NO: 1163 - DNA, 96 bp, Homo Sapiens; identical to SEQ ID NO: 1162

SEQ ID NO: 1164 - DNA, 96 bp, Homo Sapiens; identical to SEQ ID NO: 1162

SEQ ID NO: 1165 - DNA, 49 bp, Homo Sapiens
  misc_feature 19, 30, 33, 43, 45, 49: n = A,T,C or G
tttttttttttttgaccanaaatatgctgnagnaactaaactntngttn

SEQ ID NO: 1166 - DNA, 33 bp, Homo Sapiens
  misc_feature 19, 26, 30, 33: n = A,T,C or G
tttttttttttttgaccanaaatatnccgnagn

SEQ ID NO: 1167 - DNA, 96 bp, Homo Sapiens
  misc_feature 30, 33, 43, 58, 63, 74, 85, 86: n = A,T,C or G
tttttttttttttgaccaaaaatatgctgnagnaactaaactnttgttaatataaatnacccnggggaaaaatnggtttccttanncctcgttgaa

SEQ ID NO: 1168 - DNA, 138 bp, Homo Sapiens
tttacaacgaggaccggcagtgggacgaccggggcaccgggcatgtgtcgtctggctacgtggagcggctgaagggcatgtccctgcttgtcagggctgagagcgacggttctctacttttagagtcaaaaaaaaaaa

SEQ ID NO: 1169 - DNA, 100 bp, Homo Sapiens; identical to SEQ ID NO: 1161

SEQ ID NO: 1170 - DNA, 100 bp, Homo Sapiens; identical to SEQ ID NO: 1161

SEQ ID NO: 1171 - DNA, 286 bp, Homo Sapiens
tttcgatacaggagggcacaattactaaatactataggaaactttagttcgaaagggctctcactctaataggttccaagcaacatgggtggggttggagtgtggggacacacctaggcagataaatttcattcaaatatttattgttacttcctgcagtgacaagtactgttttagttgctgggaatacagggtgaacaaagcaatgttagttcctttattgggtggaaggaagtaaatgaataaatatgtctcaggtggtaataagtaatacgaaaaaaaaaaa

SEQ ID NO: 1172 - DNA, 63 bp, Homo Sapiens
ttcgatacagggaatatgcagaaagaggttatgagcgtcacagagcaagtcgaaaaaaaaaaa

SEQ ID NO: 1173 - DNA, 78 bp, Homo Sapiens
  misc_feature 72, 73, 78: n = A,T,C or G
ccctctagatgcatgctcgagcggccgccagtgtgatggatatctgcagaattcggctttttttttttttcnnggggn

SEQ ID NO: 1174 - DNA, 199 bp, Homo Sapiens
  misc_feature 7, 178, 184, 190, 194, 199: n = A,T,C or G
ctctagntgcatgctcgagcggccgccagtgtgatggatatctgcagaattcggctttcgatacaggtgctaaagttgaacgagctgatggatatgaaccaccagtccaagaatctgtttaaagttcagacttcaaatagtggcaaataaaaagtgctatttgcgaaaaaaaaaaaangccganttccancccnctggn

SEQ ID NO: 1175 - DNA, 87 bp, Homo Sapiens
  misc_feature 80, 84, 87: n = A,T,C or G
ctctagcatgcatgctcgagcggccgccagtgtgatggatatctgcagaattcggctttttttttttttccccacaccanattnaan

SEQ ID NO: 1176 - DNA, 80 bp, Homo Sapiens
  misc_feature 78, 79, 80: n = A,T,C or G
aattgggccctctagatgcatgctcgagcggccgccagtgtgatggatatctgcagaattcggctttttttttttttnnn

SEQ ID NO: 1177 - DNA, 165 bp, Homo Sapiens
  misc_feature 129, 130, 150, 159, 160, 165: n = A,T,C or G
ctctagctgcatgctcgagcggccgccagtgtgatggatatctgcagaattcggctttcgatacagggcaggacagcagaggacgtgctgggattaaacacattccccctcgaaaaaaaaaaaaaaaanngaccccagggggggggttcncccctgtanncccan

SEQ ID NO: 1178 - DNA, 61 bp, Homo Sapiens
ctctagcatgcatgctcgagcggccgccagtgtgatggatatctgcagaattccagctcac

SEQ ID NO: 1179 - DNA, 76 bp, Homo Sapiens
  misc_feature 70: n = A,T,C or G
ctctagagcatgctcgagcggccgccagtgtgatggatatctgcagaattcggctttttttttttttcgnataact

SEQ ID NO: 1180 - DNA, 66 bp, Homo Sapiens
  misc_feature 54, 58, 65, 66: n = A,T,C or G
gagcggccgccagtgtgatggatatctgcagaattcggcttttttttttttttngccnaaacaann

SEQ ID NO: 1181 - DNA, 219 bp, Homo Sapiens
  misc_feature 210, 214, 219: n = A,T,C or G
tagatgcatgctcgagcggccgccagtgtgatggatatctgcagaattcggctttcgatacaggagagggacgaactcgcctggaagaaactaaagcttgacggcttggacgaagatggggagaaggaagccgagactcataggcaacctcaatgtcatcttggccgagtatggtctggacgaaaaaaaaaaaaccaccaaaaccaaaanttangttcn

SEQ ID NO: 1182 - DNA, 214 bp, Homo Sapiens
  misc_feature 206, 211, 214: n = A,T,C or G
atgctcgagcggccgccagtgtgatggatatctgcagaattcggctttcgatacaggagagggacgaactcgcctggaagaaactaaagcttgacggcttggacgaagatggggagaaggaagcgagactcatacgcaacctcaatgtcatcttggccaagtatggtctggacgaaaaaaaaaaaaccaccaaaaccaaaatttangttcncan

SEQ ID NO: 1183 - DNA, 207 bp, Homo Sapiens
  misc_feature 7, 197, 203: n = A,T,C or G
ctctagntgcatgctcgagcggccgccagtgtgatggatatctgcagaattcggctttcgatacaggagagggacgaactcgcctggaagaaactaaagcttgacggcttggacgaagatggggagaaggaagcgagactcatacgcaacctcaatgtcatcttggccaagtatggtctgggcgaaaaaaaaaaaangccganttcc

SEQ ID NO: 1184 - DNA, 226 bp, Homo Sapiens
  misc_feature 204, 212, 219, 225, 226: n = A,T,C or G
ctctagatgcatgctcgagcggccgccagtgtgatggatatctgcagaattcggctttcgatacaggagagggacgaactcgcctggaagaaactaaagcttgacggcttggacgaagatggggagaaggaagcgagactcataccgcaacctcaatgtcatcttggccaagtatggtctggacgaaaaaaaaaaaaagccganttccagcncactggnggccgnn

SEQ ID NO: 1185 - DNA, 257 bp, Homo Sapiens
  misc_feature 200, 208, 235, 251, 253, 257: n = A,T,C or G
ccctctagatgcatgctcgagcggccgccagtgtgatggatatctgcagaattcggcttagcactttttatttgccactatttgaagtctgaactttaaacagattcttggactggtggttcatatccatcagctcgttcaactttagcacctgtatcggaaagccgaattccagcacactggcggccgctcgtgctggntccgagcncggcaccaagcttggcgtaatcatggncatagctgtttcctgncnttcn

SEQ ID NO: 1186 - DNA, 191 bp, Homo Sapiens
  misc_feature 16, 191: n = A,T,C or G
aattgggccctctagntgcatgctcgagcggccgccagtgtgatggatatctgcagaattcggctttcgatacaggtgctaaagttgaacgagctgatggatatgaaccaccagtccaagaatctgtttaaagttcagacttcaaatagtggcaaataaaaagtgctatttgcgaaaaaaaaaaaaaaaan

SEQ ID NO: 1187 - DNA, 98 bp, Homo Sapiens
  misc_feature 70, 74, 80, 90, 92, 98: n = A,T,C or G
tctagatgcatgctcgagcggccgccagtgtgatggatatctgcagaattcggctttttttttttttcgnccanaccatnctgggccaanangacatn

SEQ ID NO: 1188 - DNA, 83 bp, Homo Sapiens
  misc_feature 62, 74: n = A,T,C or G
tgcatgctcgagcggccgccagtgtgatggatatctgcagaattcggctttttttttttttngcccaaaccatnctgggccaa

SEQ ID NO: 1189 - DNA, 197 bp, Homo Sapiens
  misc_feature 144, 146, 170, 174, 190, 191, 197: n = A,T,C or G
tagatgcatgctcgagcggccgccagtgtgatggatatctgcagaattcggctttcgatacagggcaggacagcagaggacgtgctgggattaaacacattccccaagccgaattccagcacactggcggccgctcgtgctggntnctgagctcggtaccaagcttggcngtantcatggtcataggtgnnttctgn

SEQ ID NO: 1190 - DNA, 87 bp, Homo Sapiens
  misc_feature 74, 81, 84: n = A,T,C or G
ctctagatgcatgctcgagcggccgccagtgtgatggatatctgcagaattccagcacactggcggccgctcgngcatgcntcnaga

SEQ ID NO: 1191 - DNA, 262 bp, Homo Sapiens
  misc_feature 16, 237, 244, 256, 257, 262: n = A,T,C or G
aattgggccctctagntgcatgctcgagcggccgccagtgtgatggatatctgcagaattcggctttcgatacaggagagggacgaactcgcctggaagaaactaaagcttgacggcttggacgaagatggggagaaggaagcgagactcatacgcaacctcaatgtcatcttggccaagtatggtctggacgaaaaaaaaaaaaagccgaattccagcccacttggcggccgttantaggggntccgagctcggnnccaan

SEQ ID NO: 1192 - DNA, 85 bp, Homo Sapiens
  misc_feature 77, 81, 85: n = A,T,C or G
tgggccctctagagcatgctcgagcggccgccagtgtgatggatatctgcagaattcggctttttttttttttcgtnaatncaan

SEQ ID NO: 1193 - DNA, 194 bp, Homo Sapiens
  misc_feature 184, 190: n = A,T,C or G
tgggccctctagctgcatgctcgagcggccgccagtgtgatggatatctgcagaattcggctttcgatacaggtgctaaagttgaacgagctgatggatatgaaccaccagtccaagaatctgtttaaagttcagacttcaaatagtggcaaataaaaagtgctatttgcgaaaaaaaaaaaangccganttcc

SEQ ID NO: 1194 - DNA, 102 bp, Homo Sapiens
  misc_feature 13, 100: n = A,T,C or G
tgggccctctagntgcatgctcgagcggccgccagtgtgatggatatctgcagaattcggctttcgatacaggcgaaaaaaaaaaaaaaaaaccgtaaangg

SEQ ID NO: 1195 - DNA, 198 bp, Homo Sapiens
  misc_feature 190, 192, 198: n = A,T,C or G
ctctagatgcatgctcgagcggccgccagtgtgatggatatctgcagaattcggctttcgatacaggtgctaaagttgaacgagctgatggatatgaaccaccagtccaagaatctgtttaaagttcagacttcaaatagtggcaaataaaaagtgctatttgtgatggcgaaaaaaaaaaaaaaaaaantntcattn

SEQ ID NO: 1196 - DNA, 195 bp, Homo Sapiens
  misc_feature 181, 187, 193, 195: n = A,T,C or G
ccctctagagcatgctcgagcggccgccagtgtgatggatatctgcagaattcggctttcgatacaggtgctaaagttgaacgagctgatggatatgaaccaccagtccaagaatctgtttaaagttcagacttcaaatagtggcaaataaaaagtgctatttgcgaaaaaaaaaaaaaangccganttccancn

SEQ ID NO: 1197 - DNA, 96 bp, Homo Sapiens
  misc_feature 2, 16, 96: n = A,T,C or G
anttgggccctctagntgcatgctcgagcggccgccagtgtgatggatatctgcagaattcggctttcgatacaggcgaaaaaaaaaaaaaaaaan

SEQ ID NO: 1198 - DNA, 111 bp, Homo Sapiens
  misc_feature 83, 90, 97, 103, 108, 111: n = A,T,C or G
aattgggccctctagatgcatgctcgagcggccgccagtgtgatggatatctgcagaattccagcacactggcggccgctcgngcatgcntctaganggcccncaacnttn

SEQ ID NO: 1199 - DNA, 228 bp, Homo Sapiens
  misc_feature 194, 200, 208, 210, 225, 227, 228: n = A,T,C or G
tagatgcatgctcgagcggccgccagtgtgatggatatctgcagaattcggctttcgatacaggagagggacgaactcgcctggaagaaactaaagcttgacggcttggacgaagatggggagaaggaagcgagactcatacgcaacctcaatgtcatcttggccaagtatggtctggacgaaaaaaaaaaaangccganttccagcncnctggcggccgttcgngnn

SEQ ID NO: 1200 - DNA, 71 bp, Homo Sapiens
gctcgagcggccgccagtgtgatggatatctgcagaattccagcacactggcaggccgctcgagcatgcac

SEQ ID NO: 1201 - DNA, 79 bp, Homo Sapiens
  misc_feature 70: n = A,T,C or G
atgctcgagcggccgccagtgtgatggatatctgcagaattaagccgaattccagcacactggcggccgntcgtgcagg

SEQ ID NO: 1202 - DNA, 96 bp, Homo Sapiens
  misc_feature 93, 94: n = A,T,C or G
ctctagatgcatgctcgagcggccgccagtgtgatggatatctgcagaattcggcttaagccgaattccagcacactggcggccgctcgtgcnngc

SEQ ID NO: 1203 - DNA, 149 bp, Homo Sapiens
  misc_feature 105: n = A,T,C or G
agggcgaattgggccctctagatgcatgctcgagcggccgccagtgtgatggatatctgcagaattaagccgaattccagcacactggcggccgctcgtgctggntccgagctcggtaccaagcttggcgtaatcatggtcatagctgt

SEQ ID NO: 1204 - DNA, 91 bp, Homo Sapiens
  misc_feature 86, 87, 91: n = A,T,C or G
tctagatgcatgctcgagcggccgccagtgtgatggatatctgcagaattaagccgaattccagcacactggcggccgctcgtgcnngctn

SEQ ID NO: 1205 - DNA, 87 bp, Homo Sapiens
  misc_feature 87: n = A,T,C or G
ctctagtgcatgctcgagcggccgccagtgtgatggatatctgcagaattaagccgaattccagcacactggcggccgctcgtgcan

SEQ ID NO: 1206 - DNA, 95 bp, Homo Sapiens
  misc_feature 80, 90, 93, 95: n = A,T,C or G
ccctctagatgcatgctcgagcggccgccagtgtgatggatatctgcagaattaattccagcacactggcggccgctcgngcatgcttcnagngn

SEQ ID NO: 1207 - DNA, 188 bp, Homo Sapiens
  misc_feature 180, 186, 188: n = A,T,C or G
atgctcgagcggccgccagtgtgatggatatctgcagaattcggctttcgatacaggtgctaaagttgaacgagctgatggatatgaaccaccagtccaagaatctgtttaaagttcagacttcaaatagtggcaaataaaaagtgctaagccgaattccagcacactggcggcccgctngtgctngn

SEQ ID NO: 1208 - DNA, 106 bp, Homo Sapiens
  misc_feature 70, 78, 81, 94, 100, 105, 106: n = A,T,C or G
atgctcgagcggccgccagtgtgatggatatctgcagaattcggcttaattccagcacactggcggccgntcgtagcnggntccgagcgggcgntcaatncggtnn

SEQ ID NO: 1209 - DNA, 88 bp, Homo Sapiens
gggccctctagatgcatgctcgagcggccgccagtgtgatggatatctgcagaattcggcttaattccagcacactggcggccgctcg

SEQ ID NO: 1210 - DNA, 109 bp, Homo Sapiens
  misc_feature 15, 95, 100: n = A,T,C or G
attgggccctctagntgcatgctcgagcggccgccagtgtgatggatatctgcagaattaagccgaattccagcacactggcggccgctcgtgcntgctnctagctcga

SEQ ID NO: 1211 - DNA, 105 bp, Homo Sapiens
  misc_feature 65, 100: n = A,T,C or G
atgctcgagcggccgccagtgtgatggatatctgcagaattcggctttttttttttttacatggnatggaaggcggaattcaagaaaatatggggggggnggggg

SEQ ID NO: 1212 - DNA, 79 bp, Homo Sapiens
tagatgcatgctcgagcggccgccagtgtgatggatatctgcagaattcggcttaattccagcacactggcggccgctc

SEQ ID NO: 1213 - DNA, 94 bp, Homo Sapiens
  misc_feature 91, 92, 94: n = A,T,C or G
gaattgggccctctagatgcatgctcgagcggccgccagtgtgatggatatctgcagaattaattccagcacactggcggccgctcgagcnngn

SEQ ID NO: 1214 - DNA, 285 bp, Homo Sapiens
  misc_feature 254, 262, 281, 282, 285: n = A,T,C or G
tagatgcatgctcgagcggccgccagtgtgatggatatctgcagaattcggctttcgatacaggctggaatatgaaatcaagactaatcatcctgattcagcaagtgagaaaaatccagttacactcttaaaggaattgtcagtgataaagtctcgatatcaaactttgtatgcccgctttaaaccagttgctgttgagcagaaagagagtaagagccgcatttgtgctactgtgaaaaaaaaaaaaagccganttccagcncactggcggccgctcgtgnnggn

SEQ ID NO: 1215 - DNA, 194 bp, Homo Sapiens
  misc_feature 9, 180, 186, 192, 194: n = A,T,C or G
ccctctagntgcatgctcgagcggccgccagtgtgatggatatctgcagaattcggctttcgatacaggtgctaaagttgaacgagctgatggatatgaaccaccagtccaagaatctgtttaaagttcagacttcaaatagtggcaaataaaaagtgctatttgtgaaaaaaaaaaaangccganttccancn

SEQ ID NO: 1216 - DNA, 98 bp, Homo Sapiens
  misc_feature 93, 94, 98: n = A,T,C or G
tgggccctctagctgcatgctcgagcggccgccagtgtgatggatatctgcagaattaagccgaattccagcacactggcggccgctcgtgcnngctn

SEQ ID NO: 1217 - DNA, 101 bp, Homo Sapiens
  misc_feature 89, 100: n = A,T,C or G
tagatgcatgctcgagcggccgccagtgtgatggatatctgcagaattaagccgaattccagcacactggcggccgctcgtgctggctncgagctgggcnc

SEQ ID NO: 1218 - DNA, 262 bp, Homo Sapiens
  misc_feature 258, 260, 262: n = A,T,C or G
tgcatgctcgagcggccgccagtgtgatggatatctgcagaattcggctttcgatacaggctggaatatgaaatcaagactaatcatcctgattcagcaagtgagaaaaatccagttacactcttaaaggaattgtcagtgataaagtctcgatatcaaactttgtatgcccgctttaaaccagttgctgttgagcagaaagagagtaagagccgcatttgtgctactgtgaaaaaaaaaaaaagccgaattccagcncncn

SEQ ID NO: 1219 - DNA, 75 bp, Homo Sapiens
  misc_feature 67, 68, 75: n = A,T,C or G
ctcgagcggccgccagtgtgatggatatctgcagaattaagccgaattccagcacactggcggccgnncgcgccn

SEQ ID NO: 1220 - DNA, 106 bp, Homo Sapiens
  misc_feature 98, 102: n = A,T,C or G
attgggccctctagatgcatgctcgagcggccgccagtgtgatggatatctgcagaattcggcttaattccagcacactggcggccgctcgtactggntccnagct

SEQ ID NO: 1221 - DNA, 111 bp, Homo Sapiens
  misc_feature 18, 107, 110, 111: n = A,T,C or G
gcgaattgggccctctantatgcatgctcgagcggccgccagtgtgatggatatctgcagaattcggcttaattccagcacactggcggccgctcgtgcatgcttcnagnn

SEQ ID NO: 1222 - DNA, 98 bp, Homo Sapiens
  misc_feature 2, 93, 97, 98: n = A,T,C or G
anttgggccctctagatgcatgctcgagcggccgccagtgtgatggatatctgcagaattaagccgaattccagcacactggcggccgctcgngcann

SEQ ID NO: 1223 - DNA, 97 bp, Homo Sapiens
  misc_feature 89, 93: n = A,T,C or G
ctctagcatgcatgctcgagcggccgccagtgtgatggatatctgcagaattcggcttaattccagcacactggcggccgctcgtgcangctnccag

SEQ ID NO: 1224 - DNA, 261 bp, Homo Sapiens
  misc_feature 253, 259, 261: n = A,T,C or G
ccctctagctgcatgctcgagcggccgccagtgtgatggatatctgcagaatttcgatacaggctggaatatgaaatcaagactaatcatcctgattcagcaagtgagaaaaatccagtcacactcttaaaggaattgtcagtgataaagtctcgatatcaaactttgtatgcccgctttaaaccagttgctgttgagcagaaagagagtaagagccgcatttgtgctactgtgaaaaaaaaaaaaagccganttccancn

SEQ ID NO: 1225 - DNA, 100 bp, Homo Sapiens
  misc_feature 92, 99, 100: n = A,T,C or G
cgatttgggccctctaaatgcatgctcgagcggccgccagtgtgatggatatttgcagaattaagccgaattccagcacactggcggccgcncagtgcnn

SEQ ID NO: 1226 - DNA, 142 bp, Homo Sapiens
  misc_feature 87, 99, 124, 134, 135, 142: n = A,T,C or G
tagatgcatgctcgagcggccgccagtgtgatggatatctgcagaattcggcttaattccagcacactggcggccgctcgtgcaggntccgagctcggnaccaagcttgtcgtaatcatggtcntagcgtgttnnctgacan

SEQ ID NO: 1227 - DNA, 188 bp, Homo Sapiens
aattgggccctctagatgcatgctcgagcggccgccagtgtgatggatatctgcagaattcggctttcggtacagggcaaggacttacttattgcttactatgatgtggactatgaaaaagccgaattccagcacactggcggccgctcgtgctggatccgagctcggtaccaagcttggcgtaatca

SEQ ID NO: 1228 - DNA, 222 bp, Homo Sapiens
  misc_feature 212, 218: n = A,T,C or G
tagatgcatgctcgagcggccgccagtgtgatggatatctgcagaattcggctttcgatacaggtagaaggattaaatagctgaaaaatagcaaacagttgacatattcagatgcagatattctcccattaaatattttactttagttttccaattctgtatttggaacttaactgacctttaatattggtctatagtgaaaaaaaaaaaangccganttcc

SEQ ID NO: 1229 - DNA, 92 bp, Homo Sapiens
  misc_feature 84, 88: n = A,T,C or G
tctagatgcatgctcgagcggccgccagtgtgatggatatctgcagaattcggcttaattccagcacactggcaggccgctcgngcangctt

SEQ ID NO: 1230 - DNA, 83 bp, Homo Sapiens
atgcatgctcgagcggccgccagtgtgatggatatctgcagaattcggcttaattccagcacactggcggccgctcgtgcagc

SEQ ID NO: 1231 - DNA, 76 bp, Homo Sapiens
  misc_feature 74: n = A,T,C or G
catgctcgagcggccgccagtgtgatggatatctgcagaattcggctttcgatacaggtgaaaaaaaaaaaaanaa

SEQ ID NO: 1232 - DNA, 272 bp, Homo Sapiens
  misc_feature 251, 257, 265, 267, 272: n = A,T,C or G
ctctagatgcatgctcgagcggccgccagtgtgatggatatctgcagaattcggctttcgatacaggctggaatatgaaatcaagactaatcatcctgattcagcaagtgagaaaaatccagttacactcttaaaggaattgtcagtgataaagtctcgatatcaaactttgtatgcccgctttaaaccagttgctgttgagcagaaagagagtaagagccgcatttgtgctactgtgaaaaaaaaaaaangccganttccagcncnctggn

SEQ ID NO: 1233 - DNA, 265 bp, Homo Sapiens
  misc_feature 257, 263, 265: n = A,T,C or G
tctagatgcatgctcgagcggccgccagtgtgatggatatctgcagaattcggctttcgatacaggctggaatatgaaatcaagactaatcatcctgattcagcaagtgagaaaaatccagttacacctcttaaaggaattgtcagtgataaagtctcgatatcaaactttgtatgcccgctttaaaccagttgctgttgagcagaaagagagtaagagccgcatttgtgctactgtgaaaaaaaaaaaaagccganttccancn

SEQ ID NO: 1234 - DNA, 356 bp, Homo Sapiens
  misc_feature 255, 284, 292, 308, 313, 327, 334, 354: n = A,T,C or G
gcgaattgggccctctagcatgcatgctcgagcggccgccagtgtgatggatatctgcagaattcggcttgaaatcccccttgctttgcccacctacatgcatatcattctcagctctgtatctccaacccaaatacccagtgcttatttggagtctcaaaatcacgtagtccacaaatgagcccaggtgccctcttgtatctctcctccctcccctgtatcgaaagccgaattccagcacactggcggccgttngtagtggattcgagctcggtaccaagctnggcgtaancatggtcatagcctgntcccngctcccccgtcgtntcttgcnttccaccgtgcccccccccncc

SEQ ID NO: 1235 - DNA, 286 bp, Homo Sapiens
  misc_feature 266, 273: n = A,T,C or G
ctctagcatgcatgctcgagcggccgccagtgtgatggatatctgcagaattcggctttcgatacaggctggaatatgaaatcaagactaatcatcctgattcagcaagtgagaaaaatccagttacactcttaaaggaattgtcagtgataaagtctcgatatcaaactttgtatgcccgctttaaaccagttgctgttgagcagaaagagagtaagagccgcatttgtgctactgtgaaaaaaaaaaaaagccgaattccagcncactggnggccgttcgtgcg

SEQ ID NO: 1236 - DNA, 190 bp, Homo Sapiens
  misc_feature 177, 182, 188, 190: n = A,T,C or G
ctctagcagcatgctcgagcggccgccagtgtgatggatatctgcagaattcggctttcgatacaggtgctaaagttgaacgagctgatggatatgaaccaccagtccaagaatctgtttaaagttcagacttcaaatagtggcaaataaaaaatgtactgtgaaaaaaaaaaaaanccganttccancn

SEQ ID NO: 1237 - DNA, 285 bp, Homo Sapiens
  misc_feature 252, 258, 281, 283, 285: n = A,T,C or G
ctctagctgcatgctcgagcggccgccagtgtgatggatatctgcagaattcggctttcgatacaggctggaatatgaaatcaagactaatcatcctgattcagcaagtgagaaaaatccagttacacctcttaaaggaattgtcagtgataaagtctcgatatcaaactttgtatgcccgctttaaaccagttgctgttgagcagaaagagagtaagagccgcatttgtgctactgtgaaaaaaaaaaaangccganttccagcacactgggggccgttngngn

SEQ ID NO: 1238 - DNA, 151 bp, Homo Sapiens
  misc_feature 97, 105, 107, 124, 127, 142, 149, 151: n = A,T,C or G
ctctagcatgcatgctcgagcggccgccagtgtgatggatatctgcagaattcggctttcgatacaggctgtcatttgtgaaaaaaaaaaaaagccnaattccancncactggcggccgctcgngcnggatccaagctcggnaccaagntn

SEQ ID NO: 1239 - DNA, 210 bp, Homo Sapiens
  misc_feature 17, 18: n = A,T,C or G
cgatttgggccctctanntgcatgctcgagcggccgccagtgtgatggatatctgcagaattcggctttcgatacaggctggaatatgaaatcaagactaatcatcctgattcagcaagtgagaaaaatccagttacactcttaaaggaattgtcagtgataaagtctcgatatcaaactttgtatgcccgctttaaaccagttgctgtt

SEQ ID NO: 1240 - DNA, 263 bp, Homo Sapiens
  misc_feature 242, 248, 254, 258, 263: n = A,T,C or G
atgctcgagcggccgccagtgtgatggatatctgcagaattcggctttcgatacaggctggaatatgaaatcaagactaatcatcctgattcagcaagtgagaaaaatccagttacacctcttaaaggaattgtcagtgataaagtctcgatatcaaactttgtatgcccgctttaaaccagttgctgttgagcagaaagagagtaagagccgcatttgtgctactgtgaaaaaaaaaaaangccganttccancacnctggn

SEQ ID NO: 1241 - DNA, 101 bp, Homo Sapiens
  misc_feature 93, 100, 101: n = A,T,C or G
agggcgatttgggccctcaacatgcatgctcgagcggccgccagtgtgatggatatctgcagaattaattccagcacactggcggccgctcgngcccgcnn

SEQ ID NO: 1242 - DNA, 82 bp, Homo Sapiens
  misc_feature 71, 75, 81, 82: n = A,T,C or G
ctctagcatgcatgctcgagcggccgccagtgtgatggatatctgcagaattcggctttttttttttttcngggncaaaann

SEQ ID NO: 1243 - DNA, 46 bp, Homo Sapiens
  misc_feature 27, 40, 42, 46: n = A,T,C or G
aattccagcacactggcggccgctcgngcatgcttctagngnggcn

SEQ ID NO: 1244 - DNA, 34 bp, Homo Sapiens
  misc_feature 30, 31: n = A,T,C or G
aattccagcacactggcggccgctcgtgcnngcc

SEQ ID NO: 1245 - DNA, 101 bp, Homo Sapiens
tttcgatacaggtggaaaataaacacttccattaagcttttatgtaattcaagtgatgaccttagcagttaatctgctaaagcaatacacttcagttttat

SEQ ID NO: 1246 - DNA, 194 bp, Homo Sapiens
tttcgatacaggctggaatatgaaatcaagactaatcatcctgattcagcaagtgagaaaaatccagttacactcttaaaggaattgtcagtgataaagtctcgatatcaaactttgtatgcccgctttaaaccagttgctgttgagcagaaagagagtaagagccgcatttgtgctactgtgaaaaaaaaaaa

SEQ ID NO: 1247 - DNA, 186 bp, Homo Sapiens
tttcgatacaggggagggaggagagatacaagagggcacctgggctcatttgtggactaccgtgattttgagactccaaataagcacctgggtatttgggttggagatacagagctgagaatgatatgcatgtaggtgggcaaagcaagggggatttcatgagttctaaggtagggtgaaaaaaaa

SEQ ID NO: 1248 - DNA, 193 bp, Homo Sapiens
tttcgatacaggccggaatatgaaatcaagactaatcatcctgattcagcaagtgagaaaaatccagttacacctcttaaaggaattgtcagtgataaagtctcgatatcaaactttgtatgcccgctttaaaccagttgctgttgagcagaaagagagtaagagccgcatttgtgctactgtgaaaaaaaaa

SEQ ID NO: 1249 - DNA, 196 bp, Homo Sapiens
  misc_feature 191, 194, 196: n = A,T,C or G
tttcgatacaggggagggaggagagatacaagagggcacctgggctcatttgtggactacgtgattttgagactccaaataagcacctgggtatttgggttggagatacagagctgagaatgatatgcatgtaggtgggcaaagcaagggggatttcatgagttctaaggtagggtgaaaaaaaaaaaaanccnan

SEQ ID NO: 1250 - DNA, 195 bp, Homo Sapiens
tttcgatacaggctggaatatgaaatcaagactaatcatcctgattcagcaagtgagaaaaatccagttacacctcttaaaggaattgtcagtgataaagtctcgatatcaaactttgtatgcccgctttaaaccagttgctgttgagcagaaagagagtaagagccgcatttgtgctactgtgaaaaaaaaaaa

SEQ ID NO: 1251 - DNA, 44 bp, Homo Sapiens
  misc_feature 21, 41, 43, 44: n = A,T,C or G
agcacactggcggccgctcgngcatgcttctagagggcccncnn

SEQ ID NO: 1252 - DNA, 36 bp, Homo Sapiens
  misc_feature 31, 34, 36: n = A,T,C or G
agcacactggcggccgctcgtgcatgcttcnagngn

SEQ ID NO: 1253 - DNA, 40 bp, Homo Sapiens
  misc_feature 25, 34, 36, 40: n = A,T,C or G
agcacactggcggccgctcgtgcangcttctagngngccn

SEQ ID NO: 1254 - DNA, 64 bp, Homo Sapiens
  misc_feature 42, 44, 55, 60, 64: n = A,T,C or G
agcacactggcggccgctcgagcatgcatctagagggcccantncgccctatagngagtngtan

SEQ ID NO: 1255 - DNA, 101 bp, Homo Sapiens
tttcgatacaggtggggcatgtcctcatcctttcctgccataaaagctatgacacgagaatcagaatattaataaaactttatgtacctgctgaaaaaaaa

SEQ ID NO: 1256 - DNA, 110 bp, Homo Sapiens
  misc_feature 107: n = A,T,C or G
tttcgatacaggtggggcatgtcctcatcctttcctgccataaaagctatgacacgagaatcagaatattaataaaactttatgtactgctgaaaaaaaaaaaaaangct

SEQ ID NO: 1257 - DNA, 117 bp, Homo Sapiens
  misc_feature 111, 115, 117: n = A,T,C or G
tttcgatacaggtggggcatgtcctcatcctttcctgccataaaagctatgacacgagaatcagaatattaataaaactttatgtacctgctgaaaaaaaaaaaaaaaaantaangn

SEQ ID NO: 1258 - DNA, 88 bp, Homo Sapiens
  misc_feature 11, 54, 82, 83, 88: n = A,T,C or G
atagactgttnatttggggccctctaccatgcatgctcgagcggccgccagtgngatggatatctgcagaatgtaaggcttnnttttn

SEQ ID NO: 1259 - DNA, 83 bp, Homo Sapiens
  misc_feature 65, 75, 77, 83: n = A,T,C or G
tttcgatacagggcaaggacttacttattgcttactatgatgtggactatgaaaaaaaaaaaaanccggaaatgncnaaattn

SEQ ID NO: 1260 - DNA, 36 bp, Homo Sapiens
  misc_feature 17, 28, 31, 36: n = A,T,C or G
tttttttttttttaagnaaagcagcagnatnaaaan

SEQ ID NO: 1261 - DNA, 121 bp, Homo Sapiens
tttcgatacaggtggggcatgtcctcatcctttcctgccataaaagctatgacacgagaatcagaatattaataaaactttatgtactacctgtgaaaaaaaaaaaaaaaaaaaaaaaaat

SEQ ID NO: 1262 - DNA, 32 bp, Homo Sapiens
  misc_feature 29, 31, 32: n = A,T,C or G
aattccagcacacctggcggccgctcgtncnn

SEQ ID NO: 1263 - DNA, 113 bp, Homo Sapiens
  misc_feature 107, 108, 113: n = A,T,C or G
tttcgatacaggtggggcatgtcctcatcctttcctgccataaaagctatgacacgagaatcagaatattaataaaactttatgtactgctgaaaaaaaaaaaaaannctttn

SEQ ID NO: 1264 - DNA, 115 bp, Homo Sapiens
  misc_feature 108, 113, 115: n = A,T,C or G
tttcgatacaggtggggcatgtcctcatcctttcctgccataaaagctatgacacgagaatcagaatattaataaaactttatgtacctgctgaaaaaaaaaaaaaangtccntn

SEQ ID NO: 1265 - DNA, 134 bp, Homo Sapiens
  misc_feature 128, 133, 134: n = A,T,C or G
tttcgatacaggtggggcatgtcctcatcctttcctgccataaaagctatgacacgagaatcagaatattaataaaactttatgtacctgctgaaaaaaaaaaaaaaaaaaattaaggtttaagggangtaann

SEQ ID NO: 1266 - DNA, 105 bp, Homo Sapiens
  misc_feature 63, 70, 75, 97, 101, 105: n = A,T,C or G
tttcgatacagggcaaggacttacttattgcttactatgatgtggactatgaaaaaaaaaaancggaaangtcanaattgtatgaaaaaaaaaaaancccnattn

SEQ ID NO: 1267 - DNA, 113 bp, Homo Sapiens
  misc_feature 106, 108, 113: n = A,T,C or G
atacaggggaaagagaaaactagggctgtttttgcagactgtattccagacttttcaagtgatcgttaaaaataatgtttgatgaaaaaaaaaaaaaaccggaatngncaaan

SEQ ID NO: 1268 - DNA, 135 bp, Homo Sapiens
  misc_feature 129, 130, 135: n = A,T,C or G
tttcgatacaggtgctaaagttgaacgagctgatggatatgaaccaccagtccaagaatctgtttaaagttcagacttcaaatagtggcaaataaaaagtgctatttgtgatggtgaaaaaaaaaaaannccgan

SEQ ID NO: 1269 - DNA, 124 bp, Homo Sapiens
tttacaacgaggaagaggaggaagatgaagaccaggactacagctttcctatatcttctattctagagtggtaaactctctataagtgttcagtgttgacatagcctttgtgcaaaaaaaaaaa

SEQ ID NO: 1270 - DNA, 79 bp, Homo Sapiens
tttttttttgcctagaaagatgtagaagacagctcagcaaaaagaagcctcagggccgagatagatctatccctcgttg

SEQ ID NO: 1271 - DNA, 256 bp, Homo Sapiens
tttacaacgagggcaaagatgctaaatcttgctttgcattcagtaaagtgtcaagtgattaagtgtgtatttgtaccctagatgatatgaaccagcagtcttgttttggcatcatcctcatcatgttgtattccagcttcttaagtggaaggaaaagagtgctgagaaatggctctgtataatctatggctatccgaattctctgaaaaaataataaaagtcccctctattatatgagcctgtgcaaaaaaaaaaa

SEQ ID NO: 1272 - DNA, 64 bp, Homo Sapiens
  misc_feature 13, 62, 63, 64: n = A,T,C or G
ttttttttttttngcccccccttccttttttttttttttttttttttttttttttttttggnnn

SEQ ID NO: 1273 - DNA, 83 bp, Homo Sapiens
  misc_feature 14, 19, 68: n = A,T,C or G
tttacaacgagggncgganaccacttggtcaccaatagcagaggacatgtcaatgggtatgagctgcngtgatattgacatga

SEQ ID NO: 1274 - DNA, 72 bp, Homo Sapiens
  misc_feature 36, 43, 53, 60, 65, 70, 72: n = A,T,C or G
tttttttttttttgcagggaacgccaagcacaactnaaccagntgaagcattnattgagncatgngactngn

SEQ ID NO: 1275 - DNA, 339 bp, Homo Sapiens
  misc_feature 136, 240, 260, 279, 280, 291, 312, 329, 337: n = A,T,C or G
tttacaacgaggggcggagaccacttgggaccaaagcgaggacatggaatgggagagcgcagtggatgacatgaccaaaaagcaagtatttatttttgattctttggttaagaagtgtttgtttgaagtgctcagnacaaagaacatagctcctagtaatgttacttggttcgtgcagcatgaatggggaaaggaccaaggctggcactgtcatgtgctgattggaggcgaggactttantcaacctcaaggaaaatggnggagaaggcagttaaatgnntactggagcanatggctggcgactgcctgcantgttcaactaacaccancctgaaanaa

SEQ ID NO: 1276 - DNA, 374 bp, Homo Sapiens
  misc_feature 291, 300, 310, 316, 347, 348, 370, 371, 374: n = A,T,C or G
tttacaacgaggggcggagaccacttgggaccaaagcgaggacatggaatgggagagcgcagtggatgacatgaccaaaaagcaagtatttatttttgattctttggttaagaagtgtttgtttgaagtgctcagcacaaagaacatagctcctagtaatgttacttggttcgtgcagcatgaatggggaaaggaccaaggctggcactgtcatgtgctgattggaggcaaggactttagtcaacctcaaggaaaatggtggagaaggcagctaaatgtgtactggagtanatggttggngactgcctgnaatgtncaactaacaccagctgaaagaattaaactgnnagaaatagcagaggacagtgannggn

SEQ ID NO: 1277 - DNA, 94 bp, Homo Sapiens
  misc_feature 15, 21, 28, 38, 46, 58, 65, 83: n = A,T,C or G
tttttttttttttgngctgancctgttnatttggcagnaaaacganacaatccagcancccaggngggacagggggactaaancctcctcctcg

SEQ ID NO: 1278 - DNA, 64 bp, Homo Sapiens
tttacaacgaggggcggcaggtgtgcccactgggagctgcagtggtcctcatctttctcctcgt

SEQ ID NO: 1279 - DNA, 33 bp, Homo Sapiens
  misc_feature 28, 31, 33: n = A,T,C or G
tttcggtcatagggaaaaaaaaaaaaanccnan

SEQ ID NO: 1280 - DNA, 31 bp, Homo Sapiens
  misc_feature 27, 28, 31: n = A,T,C or G
tttcggtcataggaaaaaaaaaaaaannccn

SEQ ID NO: 1281 - DNA, 82 bp, Homo Sapiens
  misc_feature 80: n = A,T,C or G
cgaatggggccctctagcatgcatgctcgagcggccgccagtgtgatggatatctgcagaattcggcttttttttttttncc

SEQ ID NO: 1282 - DNA, 244 bp, Homo Sapiens
  misc_feature 221, 227, 241, 243, 244: n = A,T,C or G
ctctagcatgcatgctcgagcggccgccagtgtgatggatatctgcagaattcggctttcggtcataggggttccacagtcttttcagaaactcatatttaagggaaaatctctgaaggaaatggaaacaccgttgtcagcaccttggaatacaagatggttgccgggtcatgttggcactgctatgaccgaaagccgaattccagcacactggcggccgntacgtnctggctccgagcgngnn

SEQ ID NO: 1283 - DNA, 131 bp, Homo Sapiens
  misc_feature 9, 126, 129, 131: n = A,T,C or G
ccctctagngcatgctcgagcggccgccagtgtgatggatatctgcagaattcggctttcggtcataggtagtggagtccagtggtgtgggattggaaattcggtcatagggaaaaaaaaaaaaanccnan

SEQ ID NO: 1284 - DNA, 200 bp, Homo Sapiens
  misc_feature 195, 198, 200: n = A,T,C or G
ccctctagatgcatgctcgagcggccgccagtgtgatggatatctgcagaattcggctttcggtcatagccaagcgagaagttaaaaaggaagtaaatgaaggaattcaggctctctcaaatagtgaggaggagaagaaaggggtggcagcatcgctgcttgctcctttattgcctgagggaaaaaaaaaaaaanccnan

SEQ ID NO: 1285 - DNA, 204 bp, Homo Sapiens
ttgggccctctagaatgcatgctcgagcggccgccagtgtgatggatatctgcagaattcggctttcggtcataggggttccacagtcttttcagaaactcacatttaagggaaaatctctgaaggaaatggaaacaccgttgtcagcacttggaatacaagatggttgccgggtcatgttaattgggaaaaaaaaaaaaaaaa

SEQ ID NO: 1286 - DNA, 213 bp, Homo Sapiens
ccctctagcatgcatgctcgagcggccgccagtgtgatggatatctgcagaattcggctttcggtcataggggttccacagtcttttcagaaactcatatttaagggaaaatctctgaaggaaatggaaacaccgttgtcagcacttggaatacaagatggttgccgggtcatgttaattgggaaaagccgaattccagcacactggcggccg

SEQ ID NO: 1287 - DNA, 102 bp, Homo Sapiens
  misc_feature 82, 90, 99, 101, 102: n = A,T,C or G
ctctagatgcatgctcgagcggccgccagtgtgatggatatctgcagaattcggcttaattccagcacactggcggccgctngtactggntccgagctngnn

SEQ ID NO: 1288 - DNA, 80 bp, Homo Sapiens
  misc_feature 68, 72, 79, 80: n = A,T,C or G
ctctagatgcatgctcgagcggccgccagtgtgatggatatctgcagaattcggcttttttttttttncccnaccctann

SEQ ID NO: 1289 - DNA, 118 bp, Homo Sapiens
  misc_feature 23, 98, 111, 113, 118: n = A,T,C or G
agggcgaattgggccctctagtntgcatgctcgagcggccgccagtgtgatggatatctgcagaattcggctttcggtcataggagaaaaaaaaaaanccaaattccaacncnctgtn

SEQ ID NO: 1290 - DNA, 82 bp, Homo Sapiens
  misc_feature 9: n = A,T,C or G
ccctctagntgcatgctcgagcggccgccagtgtgatggatatctgcagaattcggctttcggtcataggaaaaaaaaaaaa

SEQ ID NO: 1291 - DNA, 127 bp, Homo Sapiens
  misc_feature 124, 126: n = A,T,C or G
ctctagagcatgctcgagcggccgccagtgtgatggatatctgcagaattcggctttcggtcataggcgataatgtctctcaagatttcaaagtcaagccgaattccagcacactggcggccgntnc

SEQ ID NO: 1292 - DNA, 193 bp, Homo Sapiens
  misc_feature 187, 191, 193: n = A,T,C or G
gccctctagcatgcatgctcgagcggccgccagtgtgatggatatctgcagaattcggctttcggtcatagcagagaagctaatggggtgggctctggggtcaggcagacagggttcaaattccagcctcccctcatattagctgtgtgatcttaggcaagtttattcatgtggaaaaaaaaaaaangccnan

SEQ ID NO: 1293 - DNA, 185 bp, Homo Sapiens
ccctctagatgcatgctcgagcggccgccagtgtgatggatatctgcagaattcggctttgactttgaaatcttgagagacattatcgcctatgaccgaaagccgaattccagcacactggcggccgttactagtggatccgagctcggtaccaagcttggcgtaatcatggtcatagctgtttc

SEQ ID NO: 1294 - DNA, 128 bp, Homo Sapiens
tttcggtcatagaggcagagtgggtttgtgcacacagagaccagcacgctcacaaccaatgaaaaaccctttaagttaaaattatgcaactattcttggaaggtaattcctgtgtggaaaaaaaaaaa

SEQ ID NO: 1295 - DNA, 127 bp, Homo Sapiens
  misc_feature 102, 112, 124, 125, 127: n = A,T,C or G
tttcggtcatagcaggaagagaaagtggaaaaactcgacgtttgtgataaaggacagggacctccttttgtgcgtgggaaaaaaaaaaaaaaaaaaaaaaangggggggggnaaaaaaaaaaanncn

SEQ ID NO: 1296 - DNA, 71 bp, Homo Sapiens
ttagcataaacatttacatttatgaatcagcttgttttcttcttgcaaacacattctcttgctatgaccga

SEQ ID NO: 1297 - DNA, 27 bp, Homo Sapiens
tttcggtcataggcggaaaaaaaaaaa

SEQ ID NO: 1298 - DNA, 88 bp, Homo Sapiens
tttcggtcatagcacacatcggacatttggaaaacagcagtggcaacaactgtatgacacacttaatgcctccactacctatgaccga

SEQ ID NO: 1299 - DNA, 38 bp, Homo Sapiens
tttcggtaataggtagtggagccactacctgtgaccga

SEQ ID NO: 1300 - DNA, 139 bp, Homo Sapiens
  misc_feature 99, 103, 116, 121, 127, 134, 137, 139: n = A,T,C or G
tttcggtcataggcggatttaggcaagagagtaacgtggtcagattttcattttggaaagttactctgacatccatgtggaaaaaaaaaaaaggggggngggnaaaaaaaaaaaancccanttcccnccccctnggngn

SEQ ID NO: 1301 - DNA, 85 bp, Homo Sapiens
tttcggtcatagcacacatcggacatttggaaaacagcagtggtaacaactgtatgacacaccttaatgcctggaaaaaaaaaaa

SEQ ID NO: 1302 - DNA, 91 bp, Homo Sapiens
  misc_feature 87, 88, 91: n = A,T,C or G
tttcggtcatagcaagagaatgtgtttgcaagaagaaaacaagctgattcataaatataaatgtttatgctgggaaaaaaaaaaaannccn

SEQ ID NO: 1303 - DNA, 72 bp, Homo Sapiens
  misc_feature 48, 67, 68, 72: n = A,T,C or G
tttcggtcataggaaaaaaaaaaaaatgtttgcaagataatttatganggggggaaaaaaaaaaaannatgn

SEQ ID NO: 1304 - DNA, 46 bp, Homo Sapiens
  misc_feature 30, 37, 40, 46: n = A,T,C or G
aattccagcacactggcggccgctcgtgcntgcttcnagngggccn

SEQ ID NO: 1305 - DNA, 97 bp, Homo Sapiens
  misc_feature 91, 92, 97: n = A,T,C or G
tttcggtcatagtgtgataaaagagttcagaacagatctcaaattaggttttgtttgtttttgtctttataatttaggaaaaaaaaaaaannccgan

SEQ ID NO: 1306 - DNA, 112 bp, Homo Sapiens
ttggcattaagtgtgtcatacagttgttgccactgctgttttccaaatgtccgatgtgtgctatgaccgaatttccaatcccacaccactggactccactacctatgaccga

SEQ ID NO: 1307 - DNA, 91 bp, Homo Sapiens
tttcggtcataggcggatttaggcaagagagtaacgtggtcagattttcattttagaaagttactctgacatccatgtggaaaaaaaaaaa

SEQ ID NO: 1308 - DNA, 27 bp, Homo Sapiens
tttcggtcataggcggaaaaaaaaaaa

SEQ ID NO: 1309 - DNA, 143 bp, Homo Sapiens
  misc_feature 126, 134, 139, 143: n = A,T,C or G
tttcggtcataggtagtggagtccagtggtgtggggactccactacctatgaccgaaagccgaattctgcagatatccatcacacctggccggccgctcgagcatgcatcatagagggcccaaccncgccctanagcgngacn

SEQ ID NO: 1310 - DNA, 46 bp, Homo Sapiens
  misc_feature 23, 25, 35, 42, 45, 46: n = A,T,C or G
aattccagcacactggcggccgntnctactggctncgagctngcnn

SEQ ID NO: 1311 - DNA, 54 bp, Homo Sapiens
  misc_feature 30, 37, 40, 50, 51, 54: n = A,T,C or G
aattccagcacactggcggccgctcgtgcntgcttcnagngggcccccanngtn

SEQ ID NO: 1312 - DNA, 148 bp, Homo Sapiens
  misc_feature 87, 97, 98, 114, 124, 134, 141, 147, 148: n = A,T,C or G
tttcggtcatagctgcgtggattgtaccaatgtcaacctggaaaaaaaaaaaaagccgaattccagcacacttggcgggccgctcgngctggctccnngggggcccccaacctnggcgtaatcntggccatagntgtttcntgacgnn

SEQ ID NO: 1313 - DNA, 129 bp, Homo Sapiens
  misc_feature 91, 102, 108, 123, 127, 129: n = A,T,C or G
tttcggtcatagaaagcatattacatacatgtttatacataagcattacatttttttaataaaaatgtatacaggtggggaaaaaaaaaangggggaaaaanggctgnggaaaaaaaaaaaancccnan

SEQ ID NO: 1314 - DNA, 111 bp, Homo Sapiens
  misc_feature 95, 102, 107, 111: n = A,T,C or G
tttcggtcataggcggatttaggcaagagagtaacgtggtcagattttcattttagaaagttacctctgacatccatgtggaaaaaaaaaaaaangatgttngcaanatan

SEQ ID NO: 1315 - DNA, 45 bp, Homo Sapiens
  misc_feature 29, 30, 39, 43, 45: n = A,T,C or G
tttcggtcatagcggaaaaaaaaaaaaannaaaataaangcgnan

SEQ ID NO: 1316 - DNA, 49 bp, Homo Sapiens
  misc_feature 13, 23, 25, 44, 47, 49: n = A,T,C or G
ttttttttttttncccccccccncntttttttttttttttcccnaanan

SEQ ID NO: 1317 - DNA, 44 bp, Homo Sapiens
  misc_feature 37, 39: n = A,T,C or G
tttcggtcatagggaaaaaaaaaaaaccctgaaaaananaaaaa

SEQ ID NO: 1318 - DNA, 99 bp, Homo Sapiens
  misc_feature 69, 70, 80, 82, 93, 96, 99: n = A,T,C or G
tttcggtcataggtagtggagtccaatggtgtgggattggaaattcggtcataggaaaaaaaaaaaaannctttgtaggncncttgtccttanttnggn

SEQ ID NO: 1319 - DNA, 73 bp, Homo Sapiens
  misc_feature 30, 31, 42, 49, 64, 69, 73: n = A,T,C or G
tttcggtcatagggaaaaaaaaaaaaaaanngttttcacagnatggtgnaaaaaaagaaaaaancaggntccn

SEQ ID NO: 1320 - DNA, 101 bp, Homo Sapiens
  misc_feature 59, 71, 84, 97, 98, 101: n = A,T,C or G
tttcggtcataggcaggcagggactgtgaaatgttatagtggaaaaaaaaaaaatgtanaggtatgtaagnggcatatcatggnaaaaaaaaaaaannccn

SEQ ID NO: 1321 - DNA, 118 bp, Homo Sapiens
  misc_feature 101, 114, 115, 118: n = A,T,C or G
tttcggtcatagcaggaagagaaagtggaaaaactcgacgtttgtgataaaggacagggacctccttttgtgcgtgggaaaaaaaaaaaaaaaaggggggnaaaaaaaaaaaannccn

SEQ ID NO: 1322 - DNA, 114 bp, Homo Sapiens
  misc_feature 59, 71, 84, 98, 101, 108, 111, 114: n = A,T,C or G
tttcggtcataggcaggcagggactgtgaaatgttatagtggaaaaaaaaaaaatgtanaggtatgtaagnggcatatcatggnaaaaaaaaaaaagnccnatttccnccnccn

SEQ ID NO: 1323 - DNA, 124 bp, Homo Sapiens
  misc_feature 32, 42, 51, 55, 64, 69, 77, 91, 95, 104, 106, 115, 117, 124: n = A,T,C or G
cgaattccagcacactggcggccgctcgtgcntgcttctagngggcccccnacgncctctgtgngcgtngtcatagntgctccctgttccncttnttgaatttntnccttccatncnacaaatn

SEQ ID NO: 1324 - DNA, 46 bp, Homo Sapiens
  misc_feature 31, 37, 42, 46: n = A,T,C or G
aattccagcacactggcggccgctcgtgctngcttcnagcgngccn

SEQ ID NO: 1325 - DNA, 57 bp, Homo Sapiens
  misc_feature 30, 37, 40, 53, 56, 57: n = A,T,C or G
aattccagcacactggcggccgctcgtgcntgcttcnagngggcccccaacgnccnn

SEQ ID NO: 1326 - DNA, 55 bp, Homo Sapiens
  misc_feature 13, 20, 47, 51, 55: n = A,T,C or G
ttttttttttttnacccaanactacaagggtttttttttttttttancaanccan

SEQ ID NO: 1327 - DNA, 59 bp, Homo Sapiens
  misc_feature 32, 39, 42, 55, 58, 59: n = A,T,C or G
ttaattccagcacactggcggccgctcgtgcntgcttcnagngggcccccaacgnccnn

SEQ ID NO: 1328 - DNA, 68 bp, Homo Sapiens
ttggtactaaggagagaggagttttatttcctccttcgatgttttcctctcagttgtaaaaaaaaaaa

SEQ ID NO: 1329 - DNA, 82 bp, Homo Sapiens
ttggtactaaggcatatgaatgggaaaaagctggccgctccgatcgtgtacaaatgaggaatgatttgggtaaaaaaaaaaa

SEQ ID NO: 1330 - DNA, 58 bp, Homo Sapiens
  misc_feature 32, 39, 42, 55, 56, 58: n = A,T,C or G
ttaattccagcacactggcggccgctcgtgcntgcttcnagngggcccccaacgnncn

SEQ ID NO: 1331 - DNA, 73 bp, Homo Sapiens
  misc_feature 70: n = A,T,C or G
ttggtactaaggctgaagggagtgatgaaacttacaagtttcatttgtggttcgtaaaaaaaaaaaaaanccc

SEQ ID NO: 1332 - DNA, 48 bp, Homo Sapiens
  misc_feature 32: n = A,T,C or G
ttaattccagcacactggcggccgctcgtgcntgcttcgagcgggccc

SEQ ID NO: 1333 - DNA, 92 bp, Homo Sapiens
  misc_feature 32, 33, 42, 48, 64, 89, 90, 92: n = A,T,C or G
cgaattccagcacactggcggccgctcgtgcnngcttcgagngggccnccaacgttggcttgancgtggtcatagctgtttcctgacgnngn

SEQ ID NO: 1334 - DNA, 56 bp, Homo Sapiens
  misc_feature 27, 30, 41, 47, 54, 56: n = A,T,C or G
aattccagcacactggcggccgctcgngcntgcttctagantggccnccaacgncn

SEQ ID NO: 1335 - DNA, 36 bp, Homo Sapiens
  misc_feature 31, 32, 36: n = A,T,C or G
aattccagcacactggcaggccgctcgtgcnngctn

SEQ ID NO: 1336 - DNA, 50 bp, Homo Sapiens
  misc_feature 13, 20, 23, 46, 47, 50: n = A,T,C or G
ttttttttttttnacccaanacnacaagggttttttttttttttannaan

SEQ ID NO: 1337 - DNA, 55 bp, Homo Sapiens
  misc_feature 30, 37, 46, 54, 55: n = A,T,C or G
aattccagcacactggcggccgctcgtgcntgcttcnagcgggccnccaacgtnn

SEQ ID NO: 1338 - DNA, 75 bp, Homo Sapiens
ttggtactaaggacaaaaaacaaatgaagagacatctattcaagaaaatctacaaaaatttggtaaaaaaaaaaa

SEQ ID NO: 1339 - DNA, 75 bp, Homo Sapiens
ttggtactaaggcgagctcagggaggaccctagaggcaattaaatgatgtcctgttccattggtaaaaaaaaaaa

SEQ ID NO: 1340 - DNA, 55 bp, Homo Sapiens; identical to SEQ ID NO: 1326
  misc_feature 13, 20, 47, 51, 55: n = A,T,C or G

SEQ ID NO: 1341 - DNA, 66 bp, Homo Sapiens
ttggtactaaggctgaagggagtgatgaaacttacaagtttcatttgtggttcgtaaaaaaaaaaa

SEQ ID NO: 1342 - DNA, 46 bp, Homo Sapiens
  misc_feature 33, 43, 44, 46: n = A,T,C or G
ttaattccagcacactggcggccgctcgtgctngctccgagcnngn

SEQ ID NO: 1343 - DNA, 68 bp, Homo Sapiens; identical to SEQ ID NO: 1328

SEQ ID NO: 1344 - DNA, 68 bp, Homo Sapiens; identical to SEQ ID NO: 1328

SEQ ID NO: 1345 - DNA, 131 bp, Homo Sapiens
  misc_feature 101, 102, 112, 117, 122, 131: n = A,T,C or G
gggcgaattgggccctctagatgcatgctcgagcggccgccagtgtgatggatatctgcagaattaagccgaattccagcacactggcggccgctcgtgcnngcttcgagcnggccnccaangttggcgtn

SEQ ID NO: 1346 - DNA, 186 bp, Homo Sapiens
  misc_feature 163, 172, 182, 184, 186: n = A,T,C or G
ccctctagatgcatgctcgagcggccgccagtgtgatggatatctgcagaattcggcttggtactaagggcaggtaattgtattctgtctgtaagtaaaagtagaattcactgtaagccgaattccagcacactggcggccgctcgtgctggcatccgagcgngcccccaanccttggcgtnancn

SEQ ID NO: 1347 - DNA, 105 bp, Homo Sapiens
  misc_feature 6, 87, 94, 97: n = A,T,C or G
ctctanatgcatgctcgagcggccgccagtgtgatggatatctgcagaattaagccgaattccagcacactggcggccgctcgtgcntgcttcnagngggccccc

SEQ ID NO: 1348 - DNA, 114 bp, Homo Sapiens
  misc_feature 96, 97, 106, 112, 114: n = A,T,C or G
aattgggccctctagatgcatgctcgagcggccgccagtgtgatggatatctgcagaattaagccgaattccagcacactggcggccgctcgtgcnngcttcgagnggggtncn

SEQ ID NO: 1349 - DNA, 84 bp, Homo Sapiens
  misc_feature 84: n = A,T,C or G
ccctctagatgcatgctcgagcggccgccagtgtgatggatatctgcagaattaagccgaattccagcacactggcggccgctn

SEQ ID NO: 1350 - DNA, 103 bp, Homo Sapiens
  misc_feature 91, 97, 103: n = A,T,C or G
gccctctagatgcatgctcgagcggccgccagtgtgatggatatctgcagaattaagccgaattccagcacactggcggccgctcgtgctngcttcnagcggn

SEQ ID NO: 1351 - DNA, 108 bp, Homo Sapiens
  misc_feature 87, 99, 103, 108: n = A,T,C or G
ctctagatgcatgctcgagcggccgccagtgtgatggatatctgcagaattcggcttaattccagcacactggcggccgctcgtgcntgcttctagcgngccnccaan

SEQ ID NO: 1352 - DNA, 116 bp, Homo Sapiens
  misc_feature 88, 101, 110, 115, 116: n = A,T,C or G
gaattgggccctctagatgcatgctcgagcggccgccagtgtgatggatatctgcagaattaattccagcacactggcggccgctcgngcatgcttctagngggcccccnacgcnn

SEQ ID NO: 1353 - DNA, 119 bp, Homo Sapiens
  misc_feature 98, 108: n = A,T,C or G
cgaattgggccctctagatgcatgctcgagcggccgccagtgtgatggatatctgcagaattaagccgaattccagcacactggcggccgctcgtgcntgcttctagngggcccccaac

SEQ ID NO: 1354 - DNA, 110 bp, Homo Sapiens
  misc_feature 89, 96: n = A,T,C or G
ccctctagatgcatgctcgagcggccgccagtgtgatggatatctgcagaattaagccgaattccagcacactggcggccgctcgtgcntgcttcnagcgggcccccaac

SEQ ID NO: 1355 - DNA, 111 bp, Homo Sapiens
  misc_feature 107, 110, 111: n = A,T,C or G
attgggccctctagatgcatgctcgagcggccgccagtgtgatggatatctgcagaattaagccgaattccagcacactggcggccgctcgtgcttgcttcgagcgnggnn

SEQ ID NO: 1356 - DNA, 93 bp, Homo Sapiens
  misc_feature 87, 89, 93: n = A,T,C or G
attgggccctctagagcatgctcgagcggccgccagtgtgatggatatctgcagaattaagccgaattccagcacactggcggccgntncgtn

SEQ ID NO: 1357 - DNA, 123 bp, Homo Sapiens
  misc_feature 103, 107, 114, 118, 123: n = A,T,C or G
agggcgaattgggccctctagatgcatgctcgagcggccgccagtgtgatggatatctgcagaattcggcttaattccagcacactggcggccgctcgtgctngctncgagcgngccnccaan

SEQ ID NO: 1358 - DNA, 108 bp, Homo Sapiens
  misc_feature 88, 92, 99, 103, 108: n = A,T,C or G
ctctagatgcatgctcgagcggccgccagtgtgatggatatctgcagaattcggcttaattccagcacactggcggccgctcgtgctngctncgagcgngccnccaan

SEQ ID NO: 1359 - DNA, 126 bp, Homo Sapiens
  misc_feature 102, 103, 112, 118, 125, 126: n = A,T,C or G
agggcgaattgggccctctagatgcatgctcgagcggccgccagtgtgatggatatctgcagaattcggcttaattccagcacactggcggccgctcgtgcnngcttcgagngggccnccaacgnn

SEQ ID NO: 1360 - DNA, 114 bp, Homo Sapiens
  misc_feature 87, 94, 97, 110, 113, 114: n = A,T,C or G
ctctagatgcatgctcgagcggccgccagtgtgatggatatctgcagaattaagccgaattccagcacactggcggccgctcgtgcntgcttcnagngggcccccaacgnccnn

SEQ ID NO: 1361 - DNA, 108 bp, Homo Sapiens
  misc_feature 87, 94: n = A,T,C or G
ctctagatgcatgctcgagcggccgccagtgtgatggatatctgcagaattcggcttaattccagcacactggcggccgctcgtgcntgcttcnagcgggcccccaac

SEQ ID NO: 1362 - DNA, 108 bp, Homo Sapiens
  misc_feature 87, 94: n = A,T,C or G
ctctagatgcatgctcgagcggccgccagtgtgatggatatctgcagaattaagccgaattccagcacactggcggccgctcgtgcntgcttcnagcgggcccccaac

SEQ ID NO: 1363 - DNA, 118 bp, Homo Sapiens
  misc_feature 97, 107: n = A,T,C or G
gaattgggccctctagatgcatgctcgagcggccgccagtgtgatggatatctgcagaattaagccgaattccagcacactggcggccgctcgtgcntgcttctagngggcccccaac

SEQ ID NO: 1364 - DNA, 179 bp, Homo Sapiens
  misc_feature 143, 151, 154, 166, 175, 177, 179: n = A,T,C or G
ctctagatgcatgctcgagcggccgccagtgtgatggatatctgcagaattcggcttaaggccattttgctccaaaagggtattactattcatactgtaaaaaaaaaaaaagccgaattccagcacacttggcggccgctcgngctggctncgngggggcccccancgcccgcgngngn

SEQ ID NO: 1365 - DNA, 146 bp, Homo Sapiens
  misc_feature 96, 106, 112, 117, 139: n = A,T,C or G
aattgggccctctagatgcatgctcgagcggccgccagtgtgatggatatctgcagaattaagccgaattccagcacactggcggccgctcgtgcntgcttctagngggccnccaangttggcgtaatcatggtcatanctgtttc

SEQ ID NO: 1366 - DNA, 111 bp, Homo Sapiens
  misc_feature 101, 111: n = A,T,C or G
gggcgaattgggccctctagatgcatgctcgagcggccgccagtgtgatggatatctgcagaattaagccgaattccagcacactggcggccgctcgtgcntgcttctagn

SEQ ID NO: 1367 - DNA, 104 bp, Homo Sapiens
  misc_feature 88, 89, 98, 104: n = A,T,C or G
cctctagatgcatgctcgagcggccgccagtgtgatggatatctgcagaattaagccgaattccagcacactggcggccgctcgtgcnngcttctagngggccn

SEQ ID NO: 1368 - DNA, 151 bp, Homo Sapiens
  misc_feature 104, 108, 119: n = A,T,C or G
tagggcgaattgggccctctagatgcatgctcgagcggccgccagtgtgatggatatctgcagaattcggcttaattccagcacactggcggccgctcgtgctngctncgagcgggccnccaagcgttggcgtaatcatggtcatagctgt

SEQ ID NO: 1369 - DNA, 105 bp, Homo Sapiens
  misc_feature 97, 99, 105: n = A,T,C or G
cgaattgggccctctagctgcatgctcgagcggccgccagtgtgatggatatctgcagaattcggcttggtactaaggcgaaaaaaaaaaaaagccnanttccan

SEQ ID NO: 1370 - DNA, 124 bp, Homo Sapiens
  misc_feature 7, 98, 116, 120, 124: n = A,T,C or G
ctctagntgcatgctcgagcggccgccagtgtgatggatatctgcagaattcggcttggtactaagggccgaaaaaaaaaaaaagccgaattccagcncacttggcggccgctcgngctngctn

SEQ ID NO: 1371 - DNA, 119 bp, Homo Sapiens
  misc_feature 88, 92, 110, 117, 119: n = A,T,C or G
ctctagatgcatgctcgagcggccgccagtgtgatggatatctgcagaattcggcttaattccagcacactggcggccgctcgtgctngctncgagcgggcccccaacgnccgcgtnan

SEQ ID NO: 1372 - DNA, 108 bp, Homo Sapiens
  misc_feature 88, 97: n = A,T,C or G
ctctagatgcatgctcgagcggccgccagtgtgatggatatctgcagaattaagccgaattccagcacactggcggccgctcgtgctngcttcgagngggcccccaac

SEQ ID NO: 1373 - DNA, 124 bp, Homo Sapiens
  misc_feature 116, 122, 124: n = A,T,C or G
ctctagagcatgctcgagcggccgccagtgtgatggatatctgcagaattcggcttggtactaaggtcatctggtaactgtgggattaatatggtcgaaaaaaaaaaaaagccganttccancn

SEQ ID NO: 1374 - DNA, 108 bp, Homo Sapiens
ctctagatgcatgctcgagcggccgccagtgtgatggatatctgcagaattaagccgaattccagcacactggcggccgctcgtgcttgcttctagcgggcccccaac

SEQ ID NO: 1375 - DNA, 94 bp, Homo Sapiens
  misc_feature 12, 14, 62, 90: n = A,T,C or G
atttgggccctntncagcatgctcgagcggccgccagtgtgatggatatctgcagaattcgncttggtactaaggcgaaaaaaaaaaaanttcc

SEQ ID NO: 1376 - DNA, 127 bp, Homo Sapiens
  misc_feature 97, 104, 107, 121, 123, 127: n = A,T,C or G
gaattgggccctctagatgcatgctcgagcggccgccagtgtgatggatatctgcagaattaagccgaattccagcacactggcggccgctcgtgcntgcttcnagngggcccccaacgtncncttn

SEQ ID NO: 1377 - DNA, 99 bp, Homo Sapiens
gcgatttgggccctctagatgcatgctcgagcggccgccagtgtgatggatatctgcagaattaagccgaattccagcacactggcggccgctcgtgct

SEQ ID NO: 1378 - DNA, 103 bp, Homo Sapiens
  misc_feature 57, 58, 94, 97, 103: n = A,T,C or G
ctctagatgcatgctcgagcggccgccagtgtgatggatatctgcagaattcggctnnattccagcacactggcggccgctcgtgcatgcttcnagngggccn

SEQ ID NO: 1379 - DNA, 112 bp, Homo Sapiens
  misc_feature 91, 101: n = A,T,C or G
gccctctagatgcatgctcgagcggccgccagtgtgatggatatctgcagaattaagccgaattccagcacactggcaggccgctcgtgcntgcttctagngggcccccaac

SEQ ID NO: 1380 - DNA, 92 bp, Homo Sapiens
  misc_feature 87, 88, 92: n = A,T,C or G
ctctagatgcatgctcgagcggccgccagtgtgatggatatctgcagaattcggcttaattccagcacactggcggccgctcgtgcnngctn

SEQ ID NO: 1381 - DNA, 91 bp, Homo Sapiens
  misc_feature 87, 90, 91: n = A,T,C or G
gccctctagatgcatgctcgagcggccgccagtgtgatggatatctgcagaattcggcttaattccagcacactggcggccgctcgngcnn

SEQ ID NO: 1382 - DNA, 96 bp, Homo Sapiens
  misc_feature 89, 90, 96: n = A,T,C or G
aattgggccctctagagcatgctcgagcggccgccagtgtgatggatatctgcagaattaattccagcacactggcggccgctcgtgcnngcttcn

SEQ ID NO: 1383 - DNA, 151 bp, Homo Sapiens
  misc_feature 89, 95, 104, 109, 146, 150, 151: n = A,T,C or G
ctctagcatgcatgctcgagcggccgccagtgtgatggatatctgcagaattaagccgaattccagcacactggcggccgctcgtgctngcttcnagcgggccnccaancttggcagtaatcatggtcatagctgtttcctgacgncgtnn

SEQ ID NO: 1384 - DNA, 96 bp, Homo Sapiens
  misc_feature 89, 90, 96: n = A,T,C or G
ccctctagatgcatgctcgagcggccgccagtgtgatggatatctgcagaattaagccgaattccagcacactggcggccgctcgtgcnngcttcn

SEQ ID NO: 1385 - DNA, 127 bp, Homo Sapiens
  misc_feature 97, 104, 121, 122, 127: n = A,T,C or G
gaattgggccctctagatgcatgctcgagcggccgccagtgtgatggatatctgcagaattaagccgaattccagcacactggcggccgctcgtgcntgcttcnagcgggcccccaacgtnngcgtn

SEQ ID NO: 1386 - DNA, 88 bp, Homo Sapiens
  misc_feature 83, 84, 88: n = A,T,C or G
ccctctagatgcatgctcgagcggccgccagtgtgatggatatctgcagaattaattccagcacactggcggccgctcgtgcnngctn

SEQ ID NO: 1387 - DNA, 101 bp, Homo Sapiens
  misc_feature 94, 95, 101: n = A,T,C or G
ttgggccctctagatgcatgctcgagcggccgccagtgtgatggatatctgcagaattaagccgaattccagcacactggcggccgctcgtgcnngcttcn

SEQ ID NO: 1388 - DNA, 115 bp, Homo Sapiens
  misc_feature 101, 108, 114, 115: n = A,T,C or G
tagggcgaattgggccctctagatgcatgctcgagcggccgccagtgtgatggatatctgcagaattcggcttaattccagcacactggcggccgctcgtnctggctncgagcnn

SEQ ID NO: 1389 - DNA, 108 bp, Homo Sapiens; identical to SEQ ID NO: 1358
  misc_feature 88, 92, 99, 103, 108: n = A,T,C or G

SEQ ID NO: 1390 - DNA, 102 bp, Homo Sapiens
  misc_feature 98: n = A,T,C or G
agggcgaattgggccctctagctgcatgctcgagcggccgccagtgtgatggatatctgcagaattaggtactaaggcgaaaaaaaaaaaaagccganttcc

SEQ ID NO: 1391 - DNA, 117 bp, Homo Sapiens
  misc_feature 7, 108, 111, 117: n = A,T,C or G
gggcganttgggccctctagatgcatgctcgagcggccgccagtgtgatggatatctgcagaattaagccgaattccagcacactggcggccgctcgtgcttgcttcnagngggccn

SEQ ID NO: 1392 - DNA, 105 bp, Homo Sapiens
  misc_feature 6, 19, 101: n = A,T,C or G
ggcganttgggccctctanatgcatgctcgagcggccgccagtgtgatggatatctgcagaattaagccgaattccagcacactggcggccgctcgtgctngctt

SEQ ID NO: 1393 - DNA, 119 bp, Homo Sapiens
  misc_feature 99, 112, 114, 119: n = A,T,C or G
cgaattgggccctctagatgcatgctcgagcggccgccagtgtgatggatatctgcagaattcggcttaattccagcacactggcggccgctcgtgctngcttcgagcgggncnccaan

SEQ ID NO: 1394 - DNA, 99 bp, Homo Sapiens
  misc_feature 88, 92, 98, 99: n = A,T,C or G
ctctagatgcatgctcgagcggccgccagtgtgatggatatctgcagaattaagccgaattccagcacactggcggccgctcgtgctngctncgagcnn

SEQ ID NO: 1395 - DNA, 96 bp, Homo Sapiens
  misc_feature 88, 92, 96: n = A,T,C or G
tctagcatgcatgctcgagcggccgccagtgtgatggatatctgcagaattcggcttaattccagcacactggcggccgctcgtgctngatncgan

SEQ ID NO: 1396 - DNA, 91 bp, Homo Sapiens; identical to SEQ ID NO: 1204
  misc_feature 86, 87, 91: n = A,T,C or G

SEQ ID NO: 1397 - DNA, 142 bp, Homo Sapiens
  misc_feature 87, 93, 104, 114: n = A,T,C or G
cgaattgggccctctagatgcatgctcgagcggccgccagtgtgatggatatctgcagaattaattccagcacactggcggccgctncgtacnggctccgagcncgccaccaancttggcgtaatcatggtcatagctgttt

SEQ ID NO: 1398 - DNA, 197 bp, Homo Sapiens
  misc_feature 183, 189, 194, 197: n = A,T,C or G
ctagcatgcatgctcgagcggccgccagtgtgatggatatctgcagaattcggcttggtactaaggtcaaaaacagtacagaattttcacaaatggaaaaatctacgaagaaaacttctttcaaaaatagagaaaactgtgagcctttctgatcactgtattaaactacgaaaaaaaaaaaangccganttccngcn

SEQ ID NO: 1399 - DNA, 206 bp, Homo Sapiens
  misc_feature 198, 200, 206: n = A,T,C or G
ccctctagatgcatgctcgagcggccgccagtgtgatggatatctgcagaattcggcttggtactaaggcctttgtgcgtgtcggtgtgcttctgcagcatgtactcttggtttttgttcctcttttctcttaccttcttgattaggtttgttctcttattaaatgatataataccgtgcgaaaaaaaaaaaaagccnanttccan

SEQ ID NO: 1400 - DNA, 107 bp, Homo Sapiens
  misc_feature 22, 103: n = A,T,C or G
agggcgaattgggccctctagntgcatgctcgagcggccgccagtgtgatggatatctgcagaattcggcttggtactaaggcgaaaaaaaaaaaaagccganttcc

SEQ ID NO: 1401 - DNA, 241 bp, Homo Sapiens
  misc_feature 186, 187, 210, 220: n = A,T,C or G
ccctctagcatgcatgctcgagcggccgccagtgtgatggatatctgcagaattcggcttctgtttattttgtcctttaggaagactaaagtagtccagctcccctacagcccagtcttgcccccaccctgcactctgtcgccttagtaccaagcccgaattccagcacactggcggccgttagtnntggatccgagcgcggtaccaagnttggcgtaancatggtcatagctgtttcctg

SEQ ID NO: 1402 - DNA, 107 bp, Homo Sapiens
  misc_feature 99: n = A,T,C or G
aattgggccctctagatgcatgctcgagcggccgccagtgtgatggatatctgcagaattcggcttaattccagcacactggcggccgctcgtgctggntccgagca

SEQ ID NO: 1403 - DNA, 135 bp, Homo Sapiens
  misc_feature 128, 132, 135: n = A,T,C or G
ttggtactaaggcgacagagtgcagggtgggggcaagactgggctgtaggggagctggactactttagtcttcctaaaggacaaaataaacagtattttatgcgaacaaaaaaaaaaaaaaaaaaagnccgnttn

SEQ ID NO: 1404 - DNA, 42 bp, Homo Sapiens
  misc_feature 32: n = A,T,C or G
ttaattccagcacactggcggccgctcgtgcnggctcccaga

SEQ ID NO: 1405 - DNA, 25 bp, Homo Sapiens
ttggtactaaggcgaaaaaaaaaaa

SEQ ID NO: 1406 - DNA, 156 bp, Homo Sapiens
  misc_feature 152, 153, 156: n = A,T,C or G
ttggtactaaggcaggaggatcacttgagccctggagtttgaggccatcctgggcaatgtagtgagaccccatctgaaacaacaacaacaaaaaatgagatgagcatttagttcatttttcagtttgctagtggtgacgaaaaaaaaaaaannccn

SEQ ID NO: 1407 - DNA, 37 bp, Homo Sapiens; identical to SEQ ID NO: 36
  misc_feature 32, 33, 37: n = A,T,C or G

SEQ ID NO: 1408 - DNA, 24 bp, Homo Sapiens
  misc_feature 3, 13, 21, 23, 24: n = A,T,C or G
ttntttttttttnctgaaggncnn

SEQ ID NO: 1409 - DNA, 50 bp, Homo Sapiens
ttggtactaaggataatacttggtttttctcgactggcgaaaaaaaaaaa

SEQ ID NO: 1410 - DNA, 163 bp, Homo Sapiens
ttggtactaagggggttgaggttattgtagacgttagattgcgggcaccgccagggattttgcagcgcttcagtgtaccgtgttagagaatattggaaaagcgtctgtgagccccgtgctgtattttgtaataaagtcttttgcagattgcgaaaaaaaaaaa

SEQ ID NO: 1411 - DNA, 95 bp, Homo Sapiens
  misc_feature 91, 92, 95: n = A,T,C or G
ttggtactaaggcaattaaatggaaaaaggatagtgctcttaacaaacagtgttagaacaactgtacatctacatgcgaaaaaaaaaaaannccn

SEQ ID NO: 1412 - DNA, 25 bp, Homo Sapiens
ttggtactaaggcgaaaaaaaaaaa

SEQ ID NO: 1413 - DNA, 25 bp, Homo Sapiens
ttggtactaaggcgaaaaaaaaaaa

SEQ ID NO: 1414 - DNA, 127 bp, Homo Sapiens
  misc_feature 121, 122, 127: n = A,T,C or G
ttggtactaaggactcagaagaaatagatgatgtgaccagacaactccaggagaagggctgtggggctcgtaccccctcaccaagtttgtctgagagctctgaagatgaaaaaaaaaaaannccgan

SEQ ID NO: 1415 - DNA, 118 bp, Homo Sapiens
  misc_feature 105, 110, 115, 118: n = A,T,C or G
ttggtactaaggcaggagaatctcatcaagagtaaatctcatcaagatcaataaggcgtttcccttttgttgtgctctgtattgccctgtgaaaaaaaaaaaaanccaanttccngcn

SEQ ID NO: 1416 - DNA, 45 bp, Homo Sapiens
  misc_feature 21, 24, 31, 41, 42, 45: n = A,T,C or G
aattccagcacactggcggcngcncccagcngacacttttnntcn

SEQ ID NO: 1417 - DNA, 32 bp, Homo Sapiens
  misc_feature 25, 31, 32: n = A,T,C or G
aattccagcacactggcggccgctncgtacnn

SEQ ID NO: 1418 - DNA, 18 bp, Homo Sapiens
ttttcatgccttagtacc

SEQ ID NO: 1419 - DNA, 135 bp, Homo Sapiens
  misc_feature 127, 129, 135: n = A,T,C or G
ttggtactaaggcggactgcatgaaagggatattggggaaaatatggcttcctcagtaaccggtaagtgttagtgatattatctaaggcaatgattctcaatccacggtgaaaaaaaaaaaaacccnanttccan

SEQ ID NO: 1420 - DNA, 127 bp, Homo Sapiens
  misc_feature 121, 122, 127: n = A,T,C or G
ttggtactaaggtagagggaaatgacattcaaagagttttacttgtctctgatttaatttttattggtttaaaatgtggtctgacattagagggttgcttcaaaggtgaaaaaaaaaaaannccgan

SEQ ID NO: 1421 - DNA, 128 bp, Homo Sapiens
  misc_feature 123, 126, 128: n = A,T,C or G
ttggtactaaggcggactgcatgaaagggatattggggaaaatatggcttcctcagtaacggtaagtgttagtgatattatctaaggcaatgattctcaatccacggtgaaaaaaaaaaaaanccnan

SEQ ID NO: 1422 - DNA, 31 bp, Homo Sapiens
  misc_feature 28, 30, 31: n = A,T,C or G
aattccagcacactggcggccgctcgtncnn

SEQ ID NO: 1423 - DNA, 133 bp, Homo Sapiens
  misc_feature 128, 131, 133: n = A,T,C or G
ttggtactaaggtgacggggaggtttgaaccaggtggaattcaccacagtgcagcaaagcagctgtggccagacttcctgtctagattcctcctcactggacagggtatttgtgaaaaaaaaaaaaanccnan

SEQ ID NO: 1424 - DNA, 127 bp, Homo Sapiens
  misc_feature 121, 122, 127: n = A,T,C or G
ttggtactaaggtgggtagatatagagtagactttagacaccatataattacttgggtttccatttttctattctgaaatcatttttcattcatttttgtcatttgtgaaaaaaaaaaaannccgan

SEQ ID NO: 1425 - DNA, 120 bp, Homo Sapiens
ttggtactaaggtagagggaaatgacattcaaagagttttacttgtctctgatttaatttttattggtttaaaatgtggtctgacattagagggttgccttcaaaggtgaaaaaaaaaaa

SEQ ID NO: 1426 - DNA, 41 bp, Homo Sapiens
  misc_feature 13: n = A,T,C or G
ttggtactaaggngtttttttttttttttttttttaaaaaa

SEQ ID NO: 1427 - DNA, 118 bp, Homo Sapiens
ttggtactaaggtggcagcagttgaagcaggaacaagtggacagagttgagttgaggagtatcttagacttcaatttataggatttggtacaattgattgcatgatgaaaaaaaaaaa

SEQ ID NO: 1428 - DNA, 50 bp, Homo Sapiens
  misc_feature 48, 49, 50: n = A,T,C or G
ttggtactaaggggctatgggcaagggctggtgtcatggaaaaaaaannn

SEQ ID NO: 1429 - DNA, 58 bp, Homo Sapiens
  misc_feature 53, 56, 58: n = A,T,C or G
ttggtactaaggggctatgggcaagggctggtgtcatggaaaaaaaaaaaaanccnan

SEQ ID NO: 1430 - DNA, 189 bp, Homo Sapiens
  misc_feature 183, 187, 189: n = A,T,C or G
ttggtactaaggcagacgacagtaaactcagcagcattgtgactggagtttaaggaaactgtgagagaaaaagctacagagaaatttacaagcggtatctctagagagtctaaagagttttaagtttaatttataggccacatagagtcactggaggttttggaacagggaaaaaaaaaaaangccnan

SEQ ID NO: 1431 - DNA, 31 bp, Homo Sapiens
  misc_feature 25, 28, 31: n = A,T,C or G
aattccagcacactggcggccgctngtnctn

SEQ ID NO: 1432 - DNA, 203 bp, Homo Sapiens
  misc_feature 185, 191, 197, 201, 203: n = A,T,C or G
gccctctagcatgcatgctcgagcggccgccagtgtgatggatatctgcagaattcggcttggtactaaggcaatagggtatgaagatcccagactctgggggagtctgctggggttgagtccagcttctacctttagagacttttttaccttgctgcttaatctcatcaggaaaaaaaaaaaangccganttccancccncn

SEQ ID NO: 1433 - DNA, 74 bp, Homo Sapiens
attgggccctctagatgcatgctcgagcggccgccagtgtgatggatatctgcagaattcggcttttttttttt

SEQ ID NO: 1434 - DNA, 246 bp, Homo Sapiens
  misc_feature 15: n = A,T,C or G
attgggccctctagntgcatgctcgagcggccgccagtgtgatggatatctgcagaattcggcttggtactaagggtgaaggagaacgacctgctcagaatgagaagaggaaggagaaaaacataaaaagaggaggcaatcgctttgagccatatgccaatccaactaaaagatacagagccttcattacaaacataccttttgatgtgaaatggcagtcacttaaagacctggaaaaaaaaaaaa

SEQ ID NO: 1435 - DNA, 108 bp, Homo Sapiens
  misc_feature 92, 104, 106, 108: n = A,T,C or G
gggcgaattgggccctctagatgcatgctcgagcggccgccagtgtgatggatatctgcagaattaagccgaattccagcacactggcggcngctcgtgctggntncn

SEQ ID NO: 1436 - DNA, 88 bp, Homo Sapiens
  misc_feature 9, 46, 82: n = A,T,C or G
gccctctancatgcatgctcgagcggccgccagtgtgatggatatntgcagaattaagccgaattccagcacactggcggcngcttcc

SEQ ID NO: 1437 - DNA, 138 bp, Homo Sapiens
  misc_feature 81, 82, 92, 97, 102, 109, 136, 137: n = A,T,C or G
cctctagagcatgctcgagcggccgccagtgtgatggatatctgcagaattaattccagcacactggcggccgctcgtgcnngcttctagcnggccnccaangttggcntaatcatggtcatagcctgtttcctgnng

SEQ ID NO: 1438 - DNA, 91 bp, Homo Sapiens
  misc_feature 89: n = A,T,C or G
atagggcgaattgggccctctagcatgcatgctcgagcggccgccagtgtgatggatatctgcagaattcggctttttttttttttacngg

SEQ ID NO: 1439 - DNA, 149 bp, Homo Sapiens
  misc_feature 99, 106, 115, 121, 129, 131: n = A,T,C or G
ggcgaattgggccctctagatgcatgctcgagcggccgccagtgtgatggatatctgcagaattagccgaattccagcacactggcggccgctcgtgcntgcttcnagcgggccnccaacnttggcgtnancatggtcatagctgtttc

SEQ ID NO: 1440 - DNA, 309 bp, Homo Sapiens
gccctctagcatgcatgctcgagcggccgccagtgtgatggatatctgcagaattcggcttgatcaagtccctgaatggaagtatgacgttgggtccctctgaagtttaattctgagttctcattaaaagaaatttgctttcattgttttatttcttaattgctatgcttcagaatcaatttgtgttttatgccctttcccccagtattgtagagcaagtcttgtgttaaaagcccagtgtgacagtgtcatgatgtagtagtgtcttactggttttttaataaatccttttgtaaaaaaaaaaaaaaa

SEQ ID NO: 1441 - DNA, 327 bp, Homo Sapiens
  misc_feature 322, 325, 327: n = A,T,C or G
gggcgaattgggccctctagcatgcatgctcgagcggccgccagtgtgatggatatctgcagaattcggcttgatcaagtccctgaatggaagtatgacgttgggtccctctgaagtttaattctgagttctcattaaaagaaatttgctttcattgttttatttcttaattgctatgcttcagaatcaatttgtgttttatgccctttcccccagtattgtagagcaagtcttgtgttaaaagcccagtgtgacagtgtcatgatgtagtagtgtcttactggttttttaataaatccttttgtgtaaaaaaaaaaaaaanccnan

SEQ ID NO: 1442 - DNA, 90 bp, Homo Sapiens
  misc_feature 84, 87, 90: n = A,T,C or G
tagggcgaattgggccctctagatgcatgctcgagcggccgccagtgtgatggatatctgcagaattcggcttttttttttttnacnggn

SEQ ID NO: 1443 - DNA, 85 bp, Homo Sapiens
  misc_feature 85: n = A,T,C or G
gggcgaattgggccctctacatgcatgctcgagcggccgccagtgtgatggatatctgcagaattcggctttttttttttttacn

SEQ ID NO: 1444 - DNA, 182 bp, Homo Sapiens
gggcgaattgggccctctagcatgcatgctcgagcggccgccagtgtgatggatatctgcagaattcggcttgatcaagtccctgaatggaagtatgacgttgaattccagcacacctggcggccgttactagtggatccgagctcggtaccaagcttggcgtaatcatggtcatagctgtt

SEQ ID NO: 1445 - DNA, 95 bp, Homo Sapiens
  misc_feature 88, 91, 95: n = A,T,C or G
aattgggccctctagatgcatgctcgagcggccgccagtgtgatggatatctgcagaattaattccagcacactggcaggccgctcgngcntgcn

SEQ ID NO: 1446 - DNA, 125 bp, Homo Sapiens
  misc_feature 123, 124, 125: n = A,T,C or G
gaattgggccctctagcatgcatgctcgagcggccgccagtgtgatggatatctgcagaattcggcttgatcaagtccctgaatggaagtatgacgttgggtttttttttttttttttttttnnn

SEQ ID NO: 1447 - DNA, 105 bp, Homo Sapiens
  misc_feature 88, 95, 101: n = A,T,C or G
ggcgaattgggccctctagcatgcatgctcgagcggccgccagtgtgatggatatctgcagaattccagcacactggcggccgctcgngcatgcntctagngggc

SEQ ID NO: 1448 - DNA, 322 bp, Homo Sapiens
  misc_feature 318: n = A,T,C or G
aattgggccctctagatgcatgctcgagcggccgccagtgtgatggatatctgcagaattcggcttgatcaagtccctgaatggaagtatgacgttgggtccctctgaagtttaattctgagttctcattaaaagaaatttgctttcattgttttatttcttaattgctatgcttcagaatcaatttgtgttttatgccctttcccccagtattgtagagcaagtcttgtgttaaaagcccagtgtgacagtgtcatgatgtagtagtgtcttactggttttttaataaatccttttgtaaaaaaaaaaaaagccganttcc

SEQ ID NO: 1449 - DNA, 145 bp, Homo Sapiens
  misc_feature 90, 98, 110, 111: n = A,T,C or G
ggcgaattgggccctctagcatgcatgctcgagcggccgccagtgtgatggatatctgcagaattaattccagcacactggcggccgttnctactggntccgagctcgcnnccaagcttggctgtaatcatggtcatagctgttt

SEQ ID NO: 1450 - DNA, 72 bp, Homo Sapiens
  misc_feature 52: n = A,T,C or G
ccctctagatgcatgctcgagcggccgccagtgtgatggatatctgcagaantcggctttttttttttttac

SEQ ID NO: 1451 - DNA, 90 bp, Homo Sapiens
  misc_feature 5, 66, 69, 76, 83, 86, 90: n = A,T,C or G
ctagnagcatgctcgagcggccgccagtgtgatggatatctgcagaattcggcttttttttttttnacngggactngatcaanccnaatn

SEQ ID NO: 1452 - DNA, 320 bp, Homo Sapiens
  misc_feature 257, 310, 316: n = A,T,C or G
ctagatgcatgctcgagcggccgccagtgtgatggatatctgcagaattcggcttgatcaagtccctgaatggaagtatgacgttgggtccctctgaagtttaattctgagttctcattaaaagaaatttgctttcattgttttatttcttaattgctatgcttcagaatcaatttgtgttttatgccctttcccccagtattgtagagcaagtcttgtgttaaaagcccagtgtgacagtgtcatgatgtagtagngtcttactggttttttaatagatccttttgtaaaaaaaaaaaaaaaaaaaaangccgtnttcc

SEQ ID NO: 1453 - DNA, 133 bp, Homo Sapiens
  misc_feature 92, 108, 118, 126, 131, 133: n = A,T,C or G
gcgaattgggccctctagatgcatgctcgagcggccgccagtgtgatggatatctgcagaattcggctttttttttttttgcctaaaaagangtaaaaaacagctcancaaaaaaaancctcaggnccganan

SEQ ID NO: 1454 - DNA, 91 bp, Homo Sapiens
  misc_feature 68, 75, 84, 86, 91: n = A,T,C or G
tagatgcatgctcgagcggccgccagtgtgatggatatctgcagaattcggctttttttttttttgcntaaaaanatgtaaaananagttn

SEQ ID NO: 1455 - DNA, 140 bp, Homo Sapiens
  misc_feature 123, 136, 138, 140: n = A,T,C or G
ctctagcatgcatgctcgagcggccgccagtgtgatggatatctgcagaattcggctttacaacgagggcaaagatgctaaatcttgctttgcattcagtaaagtgtcaagtgattaagtgcncaaaaaaaaaaancncn

SEQ ID NO: 1456 - DNA, 77 bp, Homo Sapiens
  misc_feature 69, 71, 77: n = A,T,C or G
tagatgcatgctcgagcggccgccagtgtgatggatatctgcagaattcggctttttttttttttgccnanccatgn

SEQ ID NO: 1457 - DNA, 114 bp, Homo Sapiens
  misc_feature 78, 80, 92, 97, 106, 110, 114: n = A,T,C or G
ctctagatgcatgctcgagcggccgccagtgtgatggatatctgcagaattcggctttttttttttttgcctaaaaanangtaaaaaacagntcagnaaaaaaaancctnaggn

SEQ ID NO: 1458 - DNA, 159 bp, Homo Sapiens
  misc_feature 117, 132, 141, 148, 152, 158, 159: n = A,T,C or G
ctctagatgcatgctcgagcggccgccagtgtgatggatatctgcagaatttacaacgaggatgtggtaaggtgggcccagctgtgtattatattggcaaaaaaaaaaaaagccganttccagcacattggnggccgttcntactggntccnagctgnn

SEQ ID NO: 1459 - DNA, 142 bp, Homo Sapiens
  misc_feature 137, 140, 142: n = A,T,C or G
ctctagatgcatgctcgagcggccgccagtgtgatggatatctgcagaattcggctttacaacgagggcaaagatgctaaatcttgctttgcattcagtaaagtgtcaagtgattaagtgtgcaaaaaaaaaaaaanccnan

SEQ ID NO: 1460 - DNA, 130 bp, Homo Sapiens
  misc_feature 122, 128, 130: n = A,T,C or G
ctctagatgcatgctcgagcggccgccagtgtgatggatatctgcagaattcggcttacaacgaggatgtggtaaggtgggcccagctgtgtattatattggcaaaaaaaaaaaaagccganttccancn

SEQ ID NO: 1461 - DNA, 190 bp, Homo Sapiens
  misc_feature 161, 163, 176, 183, 186, 190: n = A,T,C or G
ggcgaattgggccctctagatgcatgctcgagcggccgccagtgtgatggatatctgcagaattcggctttacaacgagggcaaagatgctaaatcttgctttgcattcagtaaagtgtcaagtgattaagtgtgcaaaaaaaaaaaaagccgaattccancncactggcggccgntcctacnggntccn

SEQ ID NO: 1462 - DNA, 131 bp, Homo Sapiens
  misc_feature 95, 104, 113, 114, 123, 127, 131: n = A,T,C or G
tagggcgaattgggccctctagcatgcatgctcgagcggccgccagtgtgatggatatctgcagaattcggctttttttttttttgcctaaaaanatgtaaaanacagctcannaaaaaaaancctnaggn

SEQ ID NO: 1463 - DNA, 123 bp, Homo Sapiens
  misc_feature 78, 96, 110, 114, 121, 123: n = A,T,C or G
ctctagatgcatgctcgagcggccgccagtgtgatggatatctgcagaattcggctttttttttttttgcctaaaaanatgtaaaaaacagctcancaaaaaaaaccctnaggnccgaaanan

SEQ ID NO: 1464 - DNA, 95 bp, Homo Sapiens
  misc_feature 86: n = A,T,C or G
gggcgaattgggccctctagatgcatgctcgagcggccgccagtgtgatggatatctgcagaattcggctttttttttttttgccnagttaacac

SEQ ID NO: 1465 - DNA, 95 bp, Homo Sapiens
aattgggccctctagatgcatgctcgagcggccgccagtgtgatggatatctgcagaattcggcttaattccagcacactggcggccgctcgtgc

SEQ ID NO: 1466 - DNA, 92 bp, Homo Sapiens; identical to SEQ ID NO: 1380
  misc_feature 87, 88, 92: n = A,T,C or G

SEQ ID NO: 1467 - DNA, 111 bp, Homo Sapiens
  misc_feature 95, 102, 105, 111: n = A,T,C or G
gggcgaattgggccctctagatgcatgctcgagcggccgccagtgtgatggatatctgcagaattaattccagcacactggcggccgctcgtgcntgcttcnagngggccn

SEQ ID NO: 1468 - DNA, 98 bp, Homo Sapiens
  misc_feature 94: n = A,T,C or G
ctctagatgcatgctcgagcggccgccagtgtgatggatatctgcagaattaagccgaattccagcacactggcggccgctcgtgctggctccnagct

SEQ ID NO: 1469 - DNA, 221 bp, Homo Sapiens
  misc_feature 174, 187, 203, 215, 217, 221: n = A,T,C or G
ctctagatgcatgctcgagcggccgccagtgtgatggatatctgcagaattcggcttgatcaagtcctgcagtcagccccagctcttctatctatatgcaggctgactgcaggacttgatcaagccgaattctgcagatatccatcacactggcggccgctcgagcatgcatcnagagggcccaatncgccctatagtgtgtntgtattacaacncnccgn

SEQ ID NO: 1470 - DNA, 152 bp, Homo Sapiens
  misc_feature 123, 127, 134, 143, 144, 152: n = A,T,C or G
gggcgaattgggccctctagatgcatgctcgagcggccgccagtgtgatggatatctgcagaattcggcttgatcaagtcctgcagtcagccaattccagcacactggcggccgctcgtgctngctncgagcgngccaccaannttggcgtn

SEQ ID NO: 1471 - DNA, 146 bp, Homo Sapiens
  misc_feature 93, 106, 112, 117: n = A,T,C or G
aattgggccctctagatgcatgctcgagcggccgccagtgtgatggatatctgcagaattcggcttaattccagcacactggcggccgctcgngcatgcttctagngggccnccaangttggcgtaatcatggtcatagctgtttc

SEQ ID NO: 1472 - DNA, 90 bp, Homo Sapiens
  misc_feature 90: n = A,T,C or G
gggcgaattgggccctctagatgcatgctcgagcggccgccagtgtgatggatatctgcagaattaattccagcacactggcggccgctn

SEQ ID NO: 1473 - DNA, 100 bp, Homo Sapiens
  misc_feature 56, 97: n = A,T,C or G
gccctctagatgcatgctcgagcggccgccagtgtgatggatatctgcagaattangccgaattccagcacactggcggccgctcgtgcaggcttcnagc

SEQ ID NO: 1474 - DNA, 248 bp, Homo Sapiens
  misc_feature 3, 197: n = A,T,C or G
ganttgggccctctagatgcatgctcgagcggccgccagtgtgatggatatctgcagaattcggcttaaacacagattgaaaatacagatttgaaggatgcaaaacctgcatatagatagaagagctggtttttcatatgggctgactgcaggacttgatcaagccgaattccagcacactgggcggccgttactantggatccgagctcggtaccaagcttggcgtaatcatggtcatagctgtttc

SEQ ID NO: 1475 - DNA, 91 bp, Homo Sapiens
  misc_feature 21, 91: n = A,T,C or G
agggcgaattgggccctctanatgcatgctcgagcggccgccagtgtgatggatatctgcagaattaattccagcacactggcggccgctn

SEQ ID NO: 1476 - DNA, 109 bp, Homo Sapiens
  misc_feature 95, 102, 105: n = A,T,C or G
attgggccctctagatgcatgctcgagcggccgccagtgtgatggatatctgcagaattcggcttaattccagcacactggcggccgctcgtgcntgcttcnagnggga

SEQ ID NO: 1477 - DNA, 132 bp, Homo Sapiens
  misc_feature 117, 123, 130, 132: n = A,T,C or G
gccctctagatgcatgctcgagcggccgccagtgtgatggatatctgcagaattcggcttgatcaagtccatcaagcagaagccgaattccagcacactggcggccgctccgtgctngcttcnagcgggncn

SEQ ID NO: 1478 - DNA, 106 bp, Homo Sapiens
  misc_feature 90, 100, 101, 106: n = A,T,C or G
aattgggccctctagatgcatgctcgagcggccgccagtgtgatggatatctgcagaattaattccagcacactggcggccgctcgtgcntgcttctagnnggccn

SEQ ID NO: 1479 - DNA, 99 bp, Homo Sapiens
  misc_feature 94, 95, 99: n = A,T,C or G
tgggccctctagatgcatgctcgagcggccgccagtgtgatggatatctgcagaattaagccgaattccagcacacctggcggccgctcgtgcnngctn

SEQ ID NO: 1480 - DNA, 88 bp, Homo Sapiens; identical to SEQ ID NO: 1386
  misc_feature 83, 84, 88: n = A,T,C or G

SEQ ID NO: 1481 - DNA, 94 bp, Homo Sapiens
  misc_feature 87, 88, 94: n = A,T,C or G
ctctagatgcatgctcgagcggccgccagtgtgatggatatctgcagaattaagccgaattccagcacactggcggccgctcgtgcnngcttcn

SEQ ID NO: 1482 - DNA, 91 bp, Homo Sapiens
  misc_feature 86, 87, 91: n = A,T,C or G
tctagatgcatgctcgagcggccgccagtgtgatggatatctgcagaattcggcttaattccagcacactggcggccgctcgtgcnngctn

SEQ ID NO: 1483 - DNA, 108 bp, Homo Sapiens
  misc_feature 96, 103, 106: n = A,T,C or G
aattgggccctctagatgcatgctcgagcggccgccagtgtgatggatatctgcagaattaagccgaattccagcacactggcggccgctcgtgcntgcttcnagngg

SEQ ID NO: 1484 - DNA, 94 bp, Homo Sapiens
  misc_feature 93: n = A,T,C or G
ctagatgcatgctcgagcggccgccagtgtgatggatatctgcagaattaagccgaattccagcacactggcggccgctcgtgctggcttcgna

SEQ ID NO: 1485 - DNA, 124 bp, Homo Sapiens
gccctctagatgcatgctcgagcggccgccagtgtgatggatatctgcagaattcggcttgatcaagtccatcaagcagaattccagcacactggcggccgctcgtgcatgcttctagcggggc

SEQ ID NO: 1486 - DNA, 101 bp, Homo Sapiens
  misc_feature 99: n = A,T,C or G
ctctagatgcatgctcgagcggccgccagtgtgatggatatctgcagaattaagccgaattccagcacactggcggccgctcgtgcaggctccgagctngc

SEQ ID NO: 1487 - DNA, 87 bp, Homo Sapiens
  misc_feature 47, 87: n = A,T,C or G
tgctcgagcggccgccagtgtgatggatatctgcagaattactgttngatggacttgatcaagccgaattccagcacactggcggcn

SEQ ID NO: 1488 - DNA, 92 bp, Homo Sapiens
ctctagatgcatgctcgagcggccgccagtgtgatggatatctgcagaattcggcttaagccgaattccagcacactggcggccgctcgtgc

SEQ ID NO: 1489 - DNA, 95 bp, Homo Sapiens
  misc_feature 81, 91, 94, 95: n = A,T,C or G
gccctctagatgcatgctcgagcggccgccagtgtgatggatatctgcagaattaattccagcacactggcggccgctcgngcatgcttcnagnn

SEQ ID NO: 1490 - DNA, 166 bp, Homo Sapiens
ccctctagagcatgctcgagcggccgccagtgtgatggatatctgcagaattcggcttaatacagatttgaaggatgcaaaacctgcatatagatagaaaagctggtttttcatatgggctgactgcaggacttgatcaagccgaattccagcacactggcggccg

SEQ ID NO: 1491 - DNA, 98 bp, Homo Sapiens
ggcgaattgggccctctagatgcatgctcgagcggccgccagtgtgatggatatctgcagaattaagccgaattccagcacactggcggccgctcgtg

SEQ ID NO: 1492 - DNA, 112 bp, Homo Sapiens
  misc_feature 96, 104, 106, 112: n = A,T,C or G
gggcgaattgggccctctagatgcatgctcgagcggccgccagtgtgatggatatctgcagaattaagccgaattccagcacactggcggccgctngtactggntncgagcn

SEQ ID NO: 1493 - DNA, 94 bp, Homo Sapiens
  misc_feature 87, 88, 94: n = A,T,C or G
ctctagatgcatgctcgagcggccgccagtgtgatggatatctgcagaattcggcttaattccagcacactggcggccgctcgtgcnngcttcn

SEQ ID NO: 1494 - DNA, 113 bp, Homo Sapiens
  misc_feature 97, 104, 107, 113: n = A,T,C or G
tagggcgaattgggccctctagatgcatgctcgagcggccgccagtgtgatggatatctgcagaattaattccagcacactggcggccgctcgtgcntgcttcnagngggccn

SEQ ID NO: 1495 - DNA, 184 bp, Homo Sapiens
ctctagatgcatgctcgagcggccgccagtgtgatggatatctgcagaattcggcttaccaaacacagattgaaaatacagatttgaaggatgcaaaacctgcatatagatagaagagctggtttttcatatgggcctgacctgcaggacttgatcaagccgaattccagcacactggcggccg

SEQ ID NO: 1496 - DNA, 198 bp, Homo Sapiens
  misc_feature 167, 195, 196: n = A,T,C or G
aattgggccctctagatgcatgctcgagcggccgccagtgtgatggatatctgcagaattcggcttgatcaagtcccactggggaaaggtttggacggtagaatcaagagctgcagtttccttggcccacaagatgctcttatgctgtaaaaaaaaaaaaagccganttccagcacacttggcggccgctcgtgnngg

SEQ ID NO: 1497 - DNA, 102 bp, Homo Sapiens
  misc_feature 95, 96, 102: n = A,T,C or G
gggcgaattgggccctctagatgcatgctcgagcggccgccagtgtgatggatatctgcagaattaattccagcacactggcggccgctcgtgcnngcttcn

SEQ ID NO: 1498 - DNA, 129 bp, Homo Sapiens
  misc_feature 84, 91, 101, 122, 126, 129: n = A,T,C or G
ccctctagatgcatgctcgagcggccgccagtgtgatggatatctgcagaattcggctttttttttttttaccaaacacagatngaaaatncagatttganggatgcaaaacctgcatatanatanaan

SEQ ID NO: 1499 - DNA, 103 bp, Homo Sapiens
  misc_feature 97, 100, 103: n = A,T,C or G
gggcgaattgggccctctagatgcatgctcgagcggccgccagtgtgatggatatctgcagaattaagccgaattccagcacacctggcggccgctngtnctn

SEQ ID NO: 1500 - DNA, 99 bp, Homo Sapiens
  misc_feature 84, 97: n = A,T,C or G
ctctagatgcatgctcgagcggccgccagtgtgatggatatctgcagaattcggcttaattccagcacactggcggccgctcgngcatgcttctagnga

SEQ ID NO: 1501 - DNA, 94 bp, Homo Sapiens
gggcgaattgggccctctagagcatgctcgagcggccgccagtgtgatggatatctgcagaattcggcttaattccagcacactggcggccgct

SEQ ID NO: 1502 - DNA, 234 bp, Homo Sapiens
  misc_feature 200, 202, 220, 228, 230, 234: n = A,T,C or G
aattgggccctctagctgcatgctcgagcggccgccagtgtgatggatatctgcagaattcggcttgatcaagtccaaaacaataaattcctgctggagaaaaccgtccagatgttcacacgatttataacagagctgctgaaagaaatcatgaaatagattgtgaatatggtaaaaaaaaaaaaagccgaattccagcncnctggcggccgttcgtgcnggctccgngngggn

SEQ ID NO: 1503 - DNA, 76 bp, Homo Sapiens
  misc_feature 6, 76: n = A,T,C or G
ctctanatgcatgctcgagcggccgccagtgtgatggatatctgcagaattaattccagcacactggcggccgctn

SEQ ID NO: 1504 - DNA, 91 bp, Homo Sapiens
  misc_feature 77, 84, 88, 91: n = A,T,C or G
tctagcatgcatgctcgagcggccgccagtgtgatggatatctgcagaattcggctttttttttttttaccacatangggactngatnaan

SEQ ID NO: 1505 - DNA, 230 bp, Homo Sapiens
  misc_feature 15, 174, 179, 188, 190: n = A,T,C or G
aattgggccctctanagcatgctcgagcggccgccagtgtgatggatatctgcagaattcggcttagatttgaaggatgcaaaacctgcatatagatagaagagctggtttttcatatgggctgactgcaggacttgatcaagccgaattccagcacactggcggccgctcctnctggntccgagcgngncaccaagcttggcgtaatcatggtcatagctgtttcctga

SEQ ID NO: 1506 - DNA, 94 bp, Homo Sapiens
  misc_feature 89, 90, 94: n = A,T,C or G
ccctctagatgcatgctcgagcggccgccagtgtgatggatatctgcagaattaagccgaattccagcacactggcggccgctcgtgcnngctn

SEQ ID NO: 1507 - DNA, 104 bp, Homo Sapiens
  misc_feature 97, 98, 104: n = A,T,C or G
agggcgaattgggccctctagcatgcatgctcgagcggccgccagtgtgatggatatctgcagaattaattccagcacactggcggccgctcgtgcnngcttcn

SEQ ID NO: 1508 - DNA, 169 bp, Homo Sapiens
  misc_feature 86, 88, 99, 103, 112, 118, 123, 130, 133, 147, 149, 157,163, 167, 169: n = A,T,C or G
gaattgggccctctagcatgcatctctcgagcggccgccagtgtgatggatatctgcagaattaagccctaattccagcaatctcngntggccgctcgngcangcttcgagnggggcnccaantgttggngtnatcatggtcatagntnttttcctntaatcnctantn

SEQ ID NO: 1509 - DNA, 96 bp, Homo Sapiens
  misc_feature 88, 90, 96: n = A,T,C or G
attgggccctctagatgcatgctctgagcggccgccagtgtgatggatatctgcagaattagccgaattccagcacactggcggccgntngtgctn

SEQ ID NO: 1510 - DNA, 146 bp, Homo Sapiens
  misc_feature 86, 87, 113, 140, 141, 146: n = A,T,C or G
tctagatgcatgctcgagcggccgccagtgtgatggatatctgcagaattaagccgaattccagcacactggcggccgctcgtgcnngcttctagcggggtaccaaggttggngtaatcatggtcatagctgtttcctgnntcaan

SEQ ID NO: 1511 - DNA, 86 bp, Homo Sapiens
  misc_feature 81, 82, 86: n = A,T,C or G
ctctagatgcatgctcgagcggccgccagtgtgatggatatctgcagaattaattccagcacactggcggccgctcgtgcnngctn

SEQ ID NO: 1512 - DNA, 381 bp, Homo Sapiens
  misc_feature 355, 361, 376, 377, 381: n = A,T,C or G
cctctagatgcatgctcgagcggccgccagtgtgatggatatctgcagaattcggcttgatcaagtccaccatttgtatccgtgggtttggcatccacagattcaaccagccacagatcaaaattttaataaatgaataaaaaataacaatacaacaatataataaaaataatacagattaaaaacaatatagtataacagctatttacatagcacttgcattaggaattattggtaatcgagatgactggcagtatacaggaggatatgcatgggttgtacgcaaatactccaccatcttctatcagggacttgatcaagccgaattccagcacactggcggccgctcgtgccngcttcnagcgggcccccaagnntggn

SEQ ID NO: 1513 - DNA, 100 bp, Homo Sapiens
  misc_feature 93, 94, 100: n = A,T,C or G
ctctagatgcatgctcgagcggccgccagtgtgatggatatctgcagaattcggcttaagccgaattccagcacactggcggccgctcgtgcnngcttcn

SEQ ID NO: 1514 - DNA, 134 bp, Homo Sapiens
  misc_feature 76, 84, 96: n = A,T,C or G
ctctagatgcatgctcgagcggccgccagtgtgatggatatctgcagaattaattccagcacactggcggccgctnctactggntccgagctcgcnaccaagcttggctgtaatcatggtcatagctgtttcct

SEQ ID NO: 1515 - DNA, 369 bp, Homo Sapiens
  misc_feature 309, 313, 321, 330, 362, 364, 369: n = A,T,C or G
ctctagcatgcatgctcgagcggccgccagtgtgatggatatctgcagaattcggcttgatcaagtccctgaatggaagtatgacgttgggtccctctgaagtttaattctgagttctcattaaaagaaatttgctttcattgttttatttcttaattgctatgcttcagaatcaatttgtgttttatgccctttcccccagtattgtagagcaagtcttgtgttaaaagcccagtgtgacagtgtcatgatgtagtagtgtcttactggttttttaataaatccttttgtaaaaaaaaaaaaaagccncgtnggaaattntccccagcntcaattggacttgatcaagccgaattccagcncnctggn

SEQ ID NO: 1516 - DNA, 110 bp, Homo Sapiens
  misc_feature 95, 104, 106, 110: n = A,T,C or G
gggcgaattgggccctctagagcatgctcgagcggccgccagtgtgatggatatctgcagaattaattccagcacactggcggccgctcgtgcangcttcgagngngccn

SEQ ID NO: 1517 - DNA, 165 bp, Homo Sapiens
  misc_feature 118, 123, 138, 143, 149, 157, 161, 165: n = A,T,C or G
ctctagcatgcatgctcgagcggccgccagtgtgatggatatctgcagaattcggcttgatcaagtccaattgatgctgtggataatttcctacgtggcttttttttttttttttttncaaanggatttattaaaaanccagnaaaacnctactacntcangacn

SEQ ID NO: 1518 - DNA, 115 bp, Homo Sapiens
  misc_feature 101, 104: n = A,T,C or G
ggcgaattgggccctctagatgcatgctcgagcggccgccagtgtgatggatatctgcagaattaattccagcacactggcggccgctcgtgcatgcttcnagngggcccccaac

SEQ ID NO: 1519 - DNA, 316 bp, Homo Sapiens
  misc_feature 309, 312, 316: n = A,T,C or G
ccctctagagcatgctcgagcggccgccagtgtgatggatatctgcagaattcggcttgatcaagtccctgaatggaagtatgacgttgggtccctctgaagtttaatcctgagttctcattaaaagaaatttgctttcattgttttatttcttaattgctatgcttcaggatcaatttgtgctttatgccctttcccccagtattgtagagcaagtcttgtgttaaaagcccagtgtgacagtgtcatgatgtagtagtgtcttactggttttttaataaatccttttgtgtaaaaaaaaaaaaaaanccncgtn

SEQ ID NO: 1520 - DNA, 122 bp, Homo Sapiens
  misc_feature 102, 106, 113, 117, 122: n = A,T,C or G
gggcgaattgggccctctagatgcatgctcgagcggccgccagtgtgatggatatctgcagaattaagccgaattccagcacactggcggccgctcgtgctngctncgagcgngccnccaan

SEQ ID NO: 1521 - DNA, 326 bp, Homo Sapiens
  misc_feature 318, 319, 326: n = A,T,C or G
aattgggccctctagatgcatgctcgagcggccgccagtgtgatggatatctgcagaattcggcttgatcaagtccctgaatggaagtatgacgttgggtccctctgaagtttaattctgagttctcattaaaagaaatttgctttcattgttttatttcttaattgctatgcttcagaatcaatttgtgttttatgccctttcccccagtattgtagagcaagtcttgtgttaaaagcccagtgtgacagtgtcatgatgtagtagtgtcttactggttttttaataaatccttttgtaaaaaaaaaaaaaaaaaannccccgtn

SEQ ID NO: 1522 - DNA, 102 bp, Homo Sapiens; identical to SEQ ID NO: 1497
  misc_feature 95, 96, 102: n = A,T,C or G

SEQ ID NO: 1523 - DNA, 113 bp, Homo Sapiens
ctctagatgcatgctcgagcggccgccagtgtgatggatatctgcagaattcggcttgatcaagtccatcaagcagaagccgaattccagcacactggcggccgctcgtgctc

SEQ ID NO: 1524 - DNA, 105 bp, Homo Sapiens
  misc_feature 22, 98, 99, 105: n = A,T,C or G
tagggcgaattgggccctctancatgcatgctcgagcggccgccagtgtgatggatatctgcagaattaattccagcacactggcggccgctcgtgcnngcttcn

SEQ ID NO: 1525 - DNA, 88 bp, Homo Sapiens
  misc_feature 8, 83, 84, 88: n = A,T,C or G
ccctctanatgcatgctcgagcggccgccagtgtgatggatatctgcagaattaattccagcacactggcggccgctcgtgcnngctn

SEQ ID NO: 1526 - DNA, 96 bp, Homo Sapiens
  misc_feature 90, 91: n = A,T,C or G
aattgggccctctagatgcatgctcgagcggccgccagtgtgatggatatctgcagaattaattccagcacactggcggccgctcgtgcnngctcc

SEQ ID NO: 1527 - DNA, 101 bp, Homo Sapiens
  misc_feature 96, 97, 101: n = A,T,C or G
gggcgaattgggccctctagcatgcatgctcgagcggccgccagtgtgatggatatctgcagaattaattccagcacactggcggccgctcgtgcnngctn

SEQ ID NO: 1528 - DNA, 129 bp, Homo Sapiens
  misc_feature 115, 120, 126, 129: n = A,T,C or G
ctagcatgcatgctcgagcggccgccagtgtgatggatatctgcagaattcggcttgatcaagtccaattgatgctgtggataatttcctacgtggctttttttttttttttttncaaanggattnatn

SEQ ID NO: 1529 - DNA, 102 bp, Homo Sapiens
  misc_feature 97, 98, 102: n = A,T,C or G
agggcgaattgggccctctagcatgcatgctcgagcggccgccagtgtgatggatatctgcagaattaattccagcacactggcggccgctcgtgcnngctn

SEQ ID NO: 1530 - DNA, 331 bp, Homo Sapiens
  misc_feature 306, 310, 322, 325, 331: n = A,T,C or G
atgctcgagcggccgccagtgtgatggatatctgcagaattcggcttgatcaagtcccaaaaacagatgagctcagataaagtaggaaagagttcaactggtcataagactgtttttcttaaccagttttgtagtaaactgtagattgaaaataaagagacatctctggtaagagaacagaaaataatttgtaacaaatgtctgagaaaagtagtttagttgattccatgattttactcacgtgtgtaccacttgtcctcccagtattggtaaggcacccaaggacttgatcaagccgaattccancacnctggcggccggncgnccctgn

SEQ ID NO: 1531 - DNA, 109 bp, Homo Sapiens
  misc_feature 95, 97, 107: n = A,T,C or G
gggcgaattgggccctctagcatgcatgctcgagcggccgccagtgtgatggatatctgcagaattaagccgaattccagcacactggcggccgntngtactggctncg

SEQ ID NO: 1532 - DNA, 87 bp, Homo Sapiens
  misc_feature 80, 81, 87: n = A,T,C or G
ctctagagcatgctcgagcggccgccagtgtgatggatatctgcagaattaattccagcacactggcggccgctcgtgcnngcttcn

SEQ ID NO: 1533 - DNA, 125 bp, Homo Sapiens
  misc_feature 117, 122, 125: n = A,T,C or G
ccctctagatgcatgctcgagcggccgccagtgtgatggatatctgcagaattcggcttgatcaagtccaattgatgctgtggataatttcctacgtggcttttttttttttttttncaaanggn

SEQ ID NO: 1534 - DNA, 117 bp, Homo Sapiens
  misc_feature 114: n = A,T,C or G
ccctctagatgcatgctcgagcggccgccagtgtgatggatatctgcagaattcggcttgatcaagtccatcaagcagaagccgaattccagcacactggcggccgctcgtgcnggc

SEQ ID NO: 1535 - DNA, 91 bp, Homo Sapiens; identical to SEQ ID NO: 1482
  misc_feature 86, 87, 91: n = A,T,C or G

SEQ ID NO: 1536 - DNA, 177 bp, Homo Sapiens
  misc_feature 134, 159, 170, 171, 177: n = A,T,C or G
ggccctctagatgcatgctcgagcggccgccagtgtgatggatatctgcagaattcggcttgatcaagtccctgaatggaagtatgacgttgggtccctctgaagtttaattctgagttctcattaaaagaaanttgctttcattgttttatttcttanttgctatgctnnagaatn

SEQ ID NO: 1537 - DNA, 368 bp, Homo Sapiens
  misc_feature 10, 359, 362, 368: n = A,T,C or G
gccctctagnatgcatgctcgagcggccgccagtgtgatggatatctgcagaattcggcttgatcaagtccaccatttgtatccgcgggtttggcatccacagattcaaccagccacagatcaaaattttaataaatgaataaaaaataacaatacaacaatataataaaaataatacagattaaaaacaatatagtataacagctatttacatagcacttgcattaggaattattggtaatcgagatgactggcagtatacaggaggatatgcatgggttgtatgcaaatactccaccatcttctatcagggacttgatcaagccgaattccagcacactgggcggccgctcgtgctngcntcgagn

SEQ ID NO: 1538 - DNA, 386 bp, Homo Sapiens
  misc_feature 353, 379, 383: n = A,T,C or G
aattgggccctctagcatgcatgctcgagcggccgccagtgtgatggatatctgcagaattcggcttgatcaagtccaccatttgtatccgtgggtttggcatccacagattcaaccagccacagatcaaaattttaataaatgaataaaaaataacaatacaacaatataataaaaataatacagattaaaaacaatatagtataacagctatttacatagcacttgcattaggaattattggtaatcgagatgactggcagtatacaggaggatatgcatgggttgtatgcaaatactccaccatcttctatcagggacttgatcaagccgaattccagcacactggcggncgctcgtgcttgctccgagcgggccncctngcc

SEQ ID NO: 1539 - DNA, 96 bp, Homo Sapiens
  misc_feature 87, 92: n = A,T,C or G
ctctagatgcatgctcgagcggccgccagtgtgatggatatctgcagaattcggcttaattccagcacactggcggccgctcgtgcnggctncgaa

SEQ ID NO: 1540 - DNA, 379 bp, Homo Sapiens
  misc_feature 343, 344, 355, 364, 375, 376, 379: n = A,T,C or G
attgggccctctagatgcatgctcgagcggccgccagtgtgatggatatctgcagaattcggcttgatcaagtcccaaaaacagatgagctcagataaagtaggaaagagttcaacctggtcataagactgtttttcttaaccagttttgtagtaaacctgtagattgaaaataaagagacatctctggtaagaagacagaaaataatttgtaacaaatgtctgagaaaagtagtttagttgattccatgattttactcacgtgtgtaccacttgtcctcccagtattggtaaggcacccaaggacttgatcaagccgaattccagcacactggcggccgctnntgctggctccnagcggggtnccaagcgttgnngtn

SEQ ID NO: 1541 - DNA, 348 bp, Homo Sapiens
ccctctagatgcatgctcgagcggccgccagtgtgatggatatctgcagaattcggcttgatcaagtccctgatagaagatggtggagtatttgcatacaacccatgcatatcctcctgtatactgccagtcatctcgattaccaataattcctaatgcaagtgctatgtaaatagctgttatactatattgtttttaatctgtattatttttattatattgttgtattgttattttttattcatttattaaaattttgatctgtggctggttgaatctgtggatgccaaacccacggatacaaatggtggacttgatcaagccgaattccagcacactggcggccgc

SEQ ID NO: 1542 - DNA, 88 bp, Homo Sapiens
  misc_feature 82, 85, 88: n = A,T,C or G
gggcgaattgggccctctagatgcatgctcgagcggccgccagtgtgatggatatctgcagaattcggcttttttttttttnacnggn

SEQ ID NO: 1543 - DNA, 91 bp, Homo Sapiens; identical to SEQ ID NO: 1482
  misc_feature 86, 87, 91: n = A,T,C or G

SEQ ID NO: 1544 - DNA, 88 bp, Homo Sapiens; identical to SEQ ID NO: 1542
  misc_feature 82, 85, 88: n = A,T,C or G

SEQ ID NO: 1545 - DNA, 97 bp, Homo Sapiens
  misc_feature 88, 92, 97: n = A,T,C or G
ctctagatgcatgctcgagcggccgccagtgtgatggatatctgcagaattcggcttaattccagcacactggcggccgctcgtgcangctncgagn

SEQ ID NO: 1546 - DNA, 98 bp, Homo Sapiens
  misc_feature 89, 93: n = A,T,C or G
ccctctagagcatgctcgagcggccgccagtgtgatggatatctgcagaattcggcttaattccagcacactggcggccgctcgtgcangctncgaga

SEQ ID NO: 1547 - DNA, 92 bp, Homo Sapiens
agggcgaattgggccctctagatgcatgctcgagcggccgccagtgtgatggatatctgcagaattaattccagcacactggcggccgctcg

SEQ ID NO: 1548 - DNA, 95 bp, Homo Sapiens
  misc_feature 16: n = A,T,C or G
aattgggccctctagntgcatgctcgagcggccgccagtgtgatggatatctgcagaattaagccgaattccagcacactggcggccgctcgtgc

SEQ ID NO: 1549 - DNA, 117 bp, Homo Sapiens
  misc_feature 20, 108, 111, 117: n = A,T,C or G
gggcgaattgggccctctanatgcatgctcgagcggccgccagtgtgatggatatctgcagaattaagccgaattccagcacactggcggccgctcgtgcatgcttcnagngggccn

SEQ ID NO: 1550 - DNA, 118 bp, Homo Sapiens
  misc_feature 102, 103, 118: n = A,T,C or G
gggcgaattgggccctctagcatgcatgctcgagcggccgccagtgtgatggatatctgcagaattaagccgaattccagcacactggcggccgctcgtgcnngcttcgagcgggccn

SEQ ID NO: 1551 - DNA, 91 bp, Homo Sapiens
  misc_feature 88: n = A,T,C or G
gccctctagatgcatgctcgagcggccgccagtgtgatggatatctgcagaattcggcttaattccagcacacctggcggccgctcgngca

SEQ ID NO: 1552 - DNA, 99 bp, Homo Sapiens
ggcgaattgggccctctagatgcatgctcgagcggccgccagtgtgatggatatctgcagaattcggcttaattccagcacactggcggccgctcgtgc

SEQ ID NO: 1553 - DNA, 91 bp, Homo Sapiens
  misc_feature 87, 90, 91: n = A,T,C or G
aattgggccctctagatgcatgctcgagcggccgccagtgtgatggatatctgcagaattaattccagcacactggcggccgctcgngcnn

SEQ ID NO: 1554 - DNA, 115 bp, Homo Sapiens
  misc_feature 94, 101, 104: n = A,T,C or G
ggcgaattgggccctctacatgcatgctcgagcggccgccagtgtgatggatatctgcagaattaattccagcacactggcggccgctcgtgcntgcttcnagngggcccccaac

SEQ ID NO: 1555 - DNA, 82 bp, Homo Sapiens
  misc_feature 76, 79, 82: n = A,T,C or G
attgggccctctagatgcatgctcgagcggccgccagtgtgatggatatctgcagaattcggcttttttttttttnacnggn

SEQ ID NO: 1556 - DNA, 112 bp, Homo Sapiens
  misc_feature 95, 105, 111, 112: n = A,T,C or G
gggcgaattgggccctctacatgcatgctcgagcggccgccagtgtgatggatatctgcagaattagccgaattccagcacactggcggccgctngtactggctncgagcnn

SEQ ID NO: 1557 - DNA, 97 bp, Homo Sapiens
  misc_feature 72, 79, 89, 93, 97: n = A,T,C or G
cctctagatgcatgctcgagcggccgccagtgtgatggatatctgcagaattcggctttttttttttttacngggactngatcaagccnaatnccan

SEQ ID NO: 1558 - DNA, 95 bp, Homo Sapiens
  misc_feature 67, 70, 79, 82, 92, 94, 95: n = A,T,C or G
tgctcgagcggccgccagtgtgatggatatctgcagaattcggcttaattccagcacactggcggcngcnggggggggntcnccacctcggngnn

SEQ ID NO: 1559 - DNA, 92 bp, Homo Sapiens
  misc_feature 85, 88, 92: n = A,T,C or G
gggcgaattgggccctctagatgcatgctcgagcggccgccagtgtgatggatatctgcagaattcggcttttttttttttaacnggnactn

SEQ ID NO: 1560 - DNA, 113 bp, Homo Sapiens
  misc_feature 58, 61, 68, 89, 92, 107, 108, 113: n = A,T,C or G
atgctcgagcggccgccagtgtgatggatatctgcagaattcggcttttttttttttnacngggactngataaagccgaattccagcanacngggggcgggccgggnnggaan

SEQ ID NO: 1561 - DNA, 116 bp, Homo Sapiens
  misc_feature 95, 114, 115, 116: n = A,T,C or G
gcgaattgggccctctagcatgcatgctcgagcggccgccagtgtgatggatatctgcagaattcggcttaattccagcacactggcggccgttnctactggatccgagctcgnnn

SEQ ID NO: 1562 - DNA, 82 bp, Homo Sapiens
  misc_feature 78, 81, 82: n = A,T,C or G
ctctagatgcatgctcgagcggccgccagtgtgatggatatctgcagaattaattccagcacactggcggccgctcgngcnn

SEQ ID NO: 1563 - DNA, 100 bp, Homo Sapiens
  misc_feature 96, 99, 100: n = A,T,C or G
gcgaattgggccctctagatgcatgctcgagcggccgccagtgtgatggatatctgcagaattaagccgaattccagcacactggcggccgctcgngcnn

SEQ ID NO: 1564 - DNA, 162 bp, Homo Sapiens
  misc_feature 7, 88, 91, 101, 107, 112, 151, 159, 161, 162: n = A,T,C or G
ctctagntgcatgctcgagcggccgccagtgtgatggatatctgcagaattcggctagccgaattccagcacactggcggccgctcgngcntgcttctagngggccnccaancttggctgtaatcatggtcatagctgtttcctgaacatntacacccntnn

SEQ ID NO: 1565 - DNA, 148 bp, Homo Sapiens
  misc_feature 74, 78, 85, 88, 96, 105, 109, 115, 125, 140, 142, 148: n = A,T,C or G
ctctagatgcatgctcgagcggccgccagtgtgatggatatctgcagaattcggctttttttttttttactggnactngatcaanccnaattccancacactggnggcngctcgngctggctccnggggggcccccaacntnggcggn

SEQ ID NO: 1566 - DNA, 112 bp, Homo Sapiens
  misc_feature 17, 88, 91, 98, 101: n = A,T,C or G
gaattgggccctctagntgcatgctcgagcggccgccagtgtgatggatatctgcagaattaattccagcacactggcggccgctcgngcntgcttcnagngggcccccaac

SEQ ID NO: 1567 - DNA, 163 bp, Homo Sapiens
  misc_feature 86, 99, 115, 149, 154, 159, 163: n = A,T,C or G
cctctagatgcatgctcgagcggccgccagtgtgatggatatctgcagaattcggcttaattccagcacactggcaggccgctcgngcatgcttctagnggggcaccaaggttgnccgtaatcatggtcatagctgtttcctgagtccntatgnccccntttn

SEQ ID NO: 1568 - DNA, 65 bp, Homo Sapiens
  misc_feature 61, 64, 65: n = A,T,C or G
tgctcgagcggccgccagtgtgatggatatctgcagaattaattccagcacactggcggcngcnn

SEQ ID NO: 1569 - DNA, 84 bp, Homo Sapiens
  misc_feature 77, 80, 84: n = A,T,C or G
tgggccctctagatgcatgctcgagcggccgccagtgtgatggatatctgcagaattcggctttttttttttttacnggnactn

SEQ ID NO: 1570 - DNA, 83 bp, Homo Sapiens
  misc_feature 78, 80, 83: n = A,T,C or G
gccctctagatgcatgctcgagcggccgccagtgtgatggatatctgcagaattcggctttttttttttttaccacananggn

SEQ ID NO: 1571 - DNA, 70 bp, Homo Sapiens
  misc_feature 39, 42, 53, 65: n = A,T,C or G
tttttttttttttacaggacttaaagatttattataaanctncattaaattancatagttgggtnctgga

SEQ ID NO: 1572 - DNA, 68 bp, Homo Sapiens
ttgatccagtaccaagtagagagattgagtagataagagtaaccatggtaattaggtaaaaaaaaaaa

SEQ ID NO: 1573 - DNA, 52 bp, Homo Sapiens
ttgatccagtaccagcagtattgattccaacgtttttttttttttttttttt

SEQ ID NO: 1574 - DNA, 66 bp, Homo Sapiens
  misc_feature 60, 61, 66: n = A,T,C or G
ttgatccagtaccgaaaaaaaaaaactgattattggtttaagctgctaaaaaaaaaaaannccaan

SEQ ID NO: 1575 - DNA, 43 bp, Homo Sapiens
  misc_feature 27, 39, 41: n = A,T,C or G
ttaattccagcacactggcggccgctnctactggatccnanct

SEQ ID NO: 1576 - DNA, 35 bp, Homo Sapiens; identical to SEQ ID NO: 1128
  misc_feature 27, 30, 35: n = A,T,C or G

SEQ ID NO: 1577 - DNA, 45 bp, Homo Sapiens
  misc_feature 27, 30, 37, 42, 45: n = A,T,C or G
aattccagcacactggcggccgctcgngcntgcttcnagatnggn

SEQ ID NO: 1578 - DNA, 46 bp, Homo Sapiens
  misc_feature 27, 30, 40, 42, 46: n = A,T,C or G
aattccagcacactggcggccgctcgngcntgcttctagngngccn

SEQ ID NO: 1579 - DNA, 37 bp, Homo Sapiens
  misc_feature 35, 37: n = A,T,C or G
aattccagcacactggcggccgctcgtgctggctncn

SEQ ID NO: 1580 - DNA, 39 bp, Homo Sapiens
  misc_feature 33, 37, 39: n = A,T,C or G
ttaattccagcacactggcggccgctcgtgcangctncn

SEQ ID NO: 1581 - DNA, 31 bp, Homo Sapiens
  misc_feature 27, 30: n = A,T,C or G
aattccagcacactggcggccgctcgngcnc

SEQ ID NO: 1582 - DNA, 32 bp, Homo Sapiens
  misc_feature 27: n = A,T,C or G
aattccagcacactggcggccgctcgngcatc

SEQ ID NO: 1583 - DNA, 37 bp, Homo Sapiens
  misc_feature 31, 34, 37: n = A,T,C or G
aattccagcacactggcggccgctcgagcangcnccn

SEQ ID NO: 1584 - DNA, 181 bp, Homo Sapiens
ttgatccagtaccggaagaatgtgagaaaaataagcaggacacaattacaactaaaaaatatatctaagcatttgcaaaggcgacaataaattattgacgcttaacctttccagtttataagactggaatataatttcaaaccacacattagtacttatgttgcacaatgaaaaaaaaaaa

SEQ ID NO: 1585 - DNA, 176 bp, Homo Sapiens
  misc_feature 99: n = A,T,C or G
ttgatccagtacatgctacacttactgcaggatttggcaaacaagattaccgaattatacaaacaatatgattttggaaaagttgttccggctgttacnggacgttttataccagagagctctctaacttttatttcagtataatcaaagataggctctattgtgaaaaaaaaaaa

SEQ ID NO: 1586 - DNA, 157 bp, Homo Sapiens
ttgatccagtaccggaagaagaaacagctcatgaggctacggaaacaggccgagaagaaccgtggagaagaaaattgacaaatacacagaggtcctcaagacccacggactcctggtctgagcccaataaagactgttaattcctcctgaaaaaaaa

SEQ ID NO: 1587 - DNA, 95 bp, Homo Sapiens
  misc_feature 54: n = A,T,C or G
tcagcacactggcggccgttactagtggatccgagctcggtaccaagcttggcngtaatcatggtcatagctgtttcctgaccccccattctttt

SEQ ID NO: 1588 - DNA, 166 bp, Homo Sapiens
  misc_feature 161, 164, 166: n = A,T,C or G
ttgatccagtacctgaaagatttgatagaagaggtccgcaaggcaagggggaagaaaagggtcccctagttgaggatagtcaggagcgtcaatgtgcttgtacatagagtgctgtagctgtgtgttccaataaattattttgtagtgaaaaaaaaaaaaanccnan

SEQ ID NO: 1589 - DNA, 164 bp, Homo Sapiens
ttgatccagtaccaagtagagagattgagtagataagagtaaccatagtaattagggaaaaaaggatatatgggtccagatgtagcctaggttgttagatgtggtagttggagcatgtgtaagttatttttaaaatgtttcttgttttctcagtgaaaaaaaaa

SEQ ID NO: 1590 - DNA, 121 bp, Homo Sapiens
  misc_feature 76, 107, 118, 119, 121: n = A,T,C or G
ttgatccagtaccggaagaagaaacagctcatgaggctacggaaacaggccgagaagaaccgtggagaagaaaatngacaaatacacagaggtcctcaggacccacngacgtcctggnntn

SEQ ID NO: 1591 - DNA, 109 bp, Homo Sapiens
  misc_feature 105, 106, 109: n = A,T,C or G
ttgatccagtacagaaaggaaaggatatttattgattaacagaagttgtctttttaaaagtgtttatttttggcaataaagagcacaacatgaaaaaaaaaaaannccn

SEQ ID NO: 1592 - DNA, 60 bp, Homo Sapiens
ttgatccagtacctagtattggaagatccaccttaacgaccgtgcatatgaaaaaaaaaa

SEQ ID NO: 1593 - DNA, 114 bp, Homo Sapiens
  misc_feature 107, 108, 114: n = A,T,C or G
ttgatccagtacagaaaggaaaggatatttattgattaacagaagttgtctttttaaaagtgtttatttttggcaataaagagcacaacatgaaaaaaaaaaaaaannacccan

SEQ ID NO: 1594 - DNA, 28 bp, Homo Sapiens
  misc_feature 21, 25, 28: n = A,T,C or G
aattccagcacactggcggcngctngtn

SEQ ID NO: 1595 - DNA, 30 bp, Homo Sapiens
  misc_feature 28: n = A,T,C or G
agcacactggcggccgctcgagcatgcntc

SEQ ID NO: 1596 - DNA, 39 bp, Homo Sapiens
  misc_feature 16, 18, 27, 36, 37, 39: n = A,T,C or G
tttttttttttttaananccccggccntaaaggggnntn

SEQ ID NO: 1597 - DNA, 44 bp, Homo Sapiens
  misc_feature 19, 29, 35, 39, 44: n = A,T,C or G
agcacactggcggccggtngtgcatgcantcgagngagncaccn

SEQ ID NO: 1598 - DNA, 109 bp, Homo Sapiens
ttgatccagtacgtacagcaagattcctgcccacaggaagggccacaggcccgctaagccccaaaggcaggatctagatgatgatgaacatgattatgaaaaaaaaaaa

SEQ ID NO: 1599 - DNA, 29 bp, Homo Sapiens
  misc_feature 25, 28, 29: n = A,T,C or G
agcacactggcggccgctcgagcgngcnn

SEQ ID NO: 1600 - DNA, 80 bp, Homo Sapiens
  misc_feature 59, 65, 73, 78, 80: n = A,T,C or G
ttgatccagtacgtaatggtgctgagagtgtttctgagggtgaaaaaaaaaaaaaaaanacccancctatttngttgntn

SEQ ID NO: 1601 - DNA, 44 bp, Homo Sapiens
  misc_feature 18, 25, 38, 39, 44: n = A,T,C or G
acactggcggccgctcgngcatgcntctagagggcccnnttcgn

SEQ ID NO: 1602 - DNA, 170 bp, Homo Sapiens
  misc_feature 122, 134, 153, 166, 169, 170: n = A,T,C or G
ttgatccagtacagcaaaggtctagtgaattcacattctaaacatttttttcatctcatttaccatgtataataatacctacttggcactattttctacttgaatcatgaaaaaaaaaaaanggggggggggancagcttgtttaaggggggnaaaaaaaaaaaangcnn

SEQ ID NO: 1603 - DNA, 113 bp, Homo Sapiens
  misc_feature 107, 111, 113: n = A,T,C or G
ttgatccagtactttgggaggctgaggtgggcgaatcactgaggtcaggagatcgaggccatcctggctaacacagtgaaaccccgtctctatgaaaaaaaaaaaangccnan

SEQ ID NO: 1604 - DNA, 109 bp, Homo Sapiens; identical to SEQ ID NO: 1598

SEQ ID NO: 1605 - DNA, 27 bp, Homo Sapiens
acactggcggccgctcgtgcatgcttc

SEQ ID NO: 1606 - DNA, 180 bp, Homo Sapiens
  misc_feature 161, 172, 174, 180: n = A,T,C or G
ctctagatgcatgctcgagcggccgccagtgtgatggatatctgcagaattcggcttgatccagtacagaaaggaaaggatatttattgattaacagaagttgtctttttaaaagtgtttatttttggcaataaagagcacaacatgaaaaaaaaaaaaantcctcaccaancntaccan

SEQ ID NO: 1607 - DNA, 142 bp, Homo Sapiens
aattgggccctctagatgcatgctcgagcggccgccagtgtgatggatatctgcagaattaattccagcacactggcggccgttactagtggatccgagctcggtaccaagcttggcgtaatcatggtcatagctgtttcct

SEQ ID NO: 1608 - DNA, 150 bp, Homo Sapiens
  misc_feature 127, 146, 149, 150: n = A,T,C or G
ggcgaattgggccctctagatgcatgctcgagcggccgccagtgtgatggatatctgcagaattcggcttctttctaccccatcatcttccacagttctggcaaaaaaaaaaaaagccgaattccancacacttggcgggccgctnctnn

SEQ ID NO: 1609 - DNA, 69 bp, Homo Sapiens
ctctagatgcatgctcgagcggccgccagtgtgatggatatctgcagaattcggctttttttttttttt

SEQ ID NO: 1610 - DNA, 145 bp, Homo Sapiens
  misc_feature 126, 141, 144, 145: n = A,T,C or G
agggcgaattgggccctctagatgcatgctcgagcggccgccagtgtgatggatatctgcagaattcggcttctttctacccacaacattaaacgcaccagggtagaaagaagccgaattccagcncactggcggccgttngtnn

SEQ ID NO: 1611 - DNA, 145 bp, Homo Sapiens
  misc_feature 131: n = A,T,C or G
gggcgaattgggccctctagcatgcatgctcgagcggccgccagtgtgatggatatctgcagaattcggcttctttctaccccatcatcttccacagttctggcaaaaaaaaaaaaagccgaattccagcncactggcggccgtt

SEQ ID NO: 1612 - DNA, 149 bp, Homo Sapiens
  misc_feature 91, 99, 101, 115, 120, 127, 132, 141, 147, 149: n = A,T,C or G
ctctagcatgcatgctcgagcggccgccagtgtgatggatatctgcagaattcggcttctttctaccctggcaaaaaaaaaaaaagccganttccagcncncttggcggccgttnctacnggatccnagctnggccccaancttggngn

SEQ ID NO: 1613 - DNA, 115 bp, Homo Sapiens
  misc_feature 7, 107, 113, 115: n = A,T,C or G
ctctagnatgcatgctcgagcggccgccagtgtgatggatatctgcagaattcggctttctaccccatcatcttccacagttctggcaaaaaaaaaaaaaagccganttccancn

SEQ ID NO: 1614 - DNA, 166 bp, Homo Sapiens
  misc_feature 89, 92, 99, 105, 121, 128, 140, 148, 157, 162, 166: n = A,T,C or G
ctctagatgcatgctcgagcggccgccagtgtgatggatatctgcagaattcggctttttttttttttgcctacaaggccctagaaaangcnccagggnaaaaanaagccgaattccagcncactggnggccgttactangggatccnagctgggcnccaancctn

SEQ ID NO: 1615 - DNA, 157 bp, Homo Sapiens
  misc_feature 79, 89, 92, 99, 105, 140, 148, 153, 157: n = A,T,C or G
ctctagatgcatgctcgagcggccgccagtgtgatggatatctgcagaattcggctttttttttttttgcctacaaggncctagaaaangcnccagggnaaaaanaagccgaattccagcacactggcggccgttactangggatccnagctnggcn

SEQ ID NO: 1616 - DNA, 135 bp, Homo Sapiens
  misc_feature 129, 134, 135: n = A,T,C or G
agggcgaattgggccctctagatgcatgctcgagcggccgccagtgtgatggatatctgcagaattcggcttctttctacccacaagaagccgaattccagcacactggcggccagctcgtgcaggctncgagnn

SEQ ID NO: 1617 - DNA, 119 bp, Homo Sapiens
  misc_feature 110, 111, 119: n = A,T,C or G
tagggcgaattgggccctctagcatgcatgctcgagcggccgccagtgtgatggatatctgcagaattcggctttttttttttttttttttttttttttttttttttttnnggataaan

SEQ ID NO: 1618 - DNA, 112 bp, Homo Sapiens
  misc_feature 22, 106, 110, 112: n = A,T,C or G
agggcgaattgggccctctagnatgcatgctcgagcggccgccagtgtgatggatatctgcagaattaagccgaattccagcacactggcggccgctcgtactggntccnan

SEQ ID NO: 1619 - DNA, 94 bp, Homo Sapiens
  misc_feature 5, 87, 88, 94: n = A,T,C or G
tctancatgcatgctcgagcggccgccagtgtgatggatatctgcagaattaagccgaattccagcacactggcggccgctcgtgcnngctccn

SEQ ID NO: 1620 - DNA, 101 bp, Homo Sapiens
  misc_feature 89, 98, 99, 101: n = A,T,C or G
gaattgggccctctagcatgcatgctcgagcggccgccagtgtgatggatatctgcagaattcggcttaattccagcacactggcggcngctcgtgcnngn

SEQ ID NO: 1621 - DNA, 98 bp, Homo Sapiens
  misc_feature 90: n = A,T,C or G
attgggccctctagatgcatgctcgagcggccgccagtgtgatggatatctgcagaattcggcttaattccagcacactggcggccgctncgtagtgc

SEQ ID NO: 1622 - DNA, 93 bp, Homo Sapiens
cctctagcatgcatgctcgagcggccgccagtgtgatggatatctgcagaattcggcttaattccagcacactggcggccgctccgtactggc

SEQ ID NO: 1623 - DNA, 92 bp, Homo Sapiens
  misc_feature 90, 91: n = A,T,C or G
gccctctagatgcatgctcgagcggccgccagtgtgatggatatctgcagaattaagccgaattccagcacactggcggccgctcgtgcnng

SEQ ID NO: 1624 - DNA, 90 bp, Homo Sapiens
ctctagatgcatgctcgagcggccgccagtgtgatggatatctgcagaattcggcttaattccagcacactggcggccgctcgtgctggc

SEQ ID NO: 1625 - DNA, 92 bp, Homo Sapiens
  misc_feature 87, 88, 92: n = A,T,C or G
ctctagatgcatgctcgagcggccgccagtgtgatggatatctgcagaattaagccgaattccagcacactggcggccgctcgtgcnngctn

SEQ ID NO: 1626 - DNA, 105 bp, Homo Sapiens
  misc_feature 91, 105: n = A,T,C or G
ggcgaattgggccctctagatgcatgctcgagcggccgccagtgtgatggatatctgcagaattaagccgaattccagcacactggcggcngctcgtgctggctn

SEQ ID NO: 1627 - DNA, 112 bp, Homo Sapiens
  misc_feature 104, 107, 112: n = A,T,C or G
ggcgaattgggccctctagcatgcatgctcgagcggccgccagtgtgatggatatctgcagaattcggcttaagccgaattccagcacactggcggccgctcgngcntgctn

SEQ ID NO: 1628 - DNA, 99 bp, Homo Sapiens
  misc_feature 7: n = A,T,C or G
ctctagntgcatgctcgagcggccgccagtgtgatggatatctgcagaattaagccgaattccagcacactggcggccgctcgtgcatgcttctagcga

SEQ ID NO: 1629 - DNA, 109 bp, Homo Sapiens
  misc_feature 100, 102, 109: n = A,T,C or G
agggcgaattgggccctctagatgcatgctcgagcggccgccagtgtgatggatatctgcagaattcggcttaattccagcacactggcggccgctcgtncnggctccn

SEQ ID NO: 1630 - DNA, 274 bp, Homo Sapiens
  misc_feature 206, 220, 248, 265, 268, 274: n = A,T,C or G
agggcgaattgggccctctagcatgcatgctcgagcggccgccagtgtgatggatatctgcagaattcggcttgatccagtacctaccttacagggattataattacctccttggtgatgggagcttgttgtgagaatgttattggatatatgcccatccctgttggagtggcaggacccctttgcttagatgaaaaaaaaaaaangccgaattccagcncacttggcggccgttactagtggatccnagctcggtaccaagctnggngtaatn

SEQ ID NO: 1631 - DNA, 93 bp, Homo Sapiens
  misc_feature 89, 93: n = A,T,C or G
tagggcgaattgggccctctagcatgcatgctcgagcggccgccagtgtgatggatatctgcagaattcggctcagcacactggcggcngctn

SEQ ID NO: 1632 - DNA, 149 bp, Homo Sapiens
  misc_feature 92, 98: n = A,T,C or G
ggcgaattgggccctctagagcatgctcgagcggccgccagtgtgatggatatctgcagaattcggcttaattccagcacactggcggccgntactantggatccgagctcggtaccaagcttggcgtaatcatggtcatagctgtttc

SEQ ID NO: 1633 - DNA, 100 bp, Homo Sapiens
  misc_feature 100: n = A,T,C or G
gcgaattgggccctctagatgcatgctcgagcggccgccagtgtgatggatatctgcagaattcggcttaattccagcacactggcggccgctcgtgcan

SEQ ID NO: 1634 - DNA, 199 bp, Homo Sapiens
  misc_feature 197: n = A,T,C or G
ttgggccctctagcatgcatgctcgagcggccgccagtgtgatggatatctgcagaattcggcttgatccagtacctaccttacagggattataattactccttggtgatgggagcttgttgtgagaatgttattggatatatgcccatccctgttggagtggcgggacccctttgcttagatgaaaaaaaaaaaangc

SEQ ID NO: 1635 - DNA, 212 bp, Homo Sapiens
  misc_feature 17, 204, 206, 212: n = A,T,C or G
gaattgggccctctagnatgcatgctcgagcggccgccagtgtgatggatatctgcagaattcggcttgatccagtacctaccttacagggattataattactccttggtgatgggagcttgttgtgagaatgttattggatatatgcccatccctgttggagtggcaggacccctttgcttagatgaaaaaaaaaaaaagccnanttccan

SEQ ID NO: 1636 - DNA, 90 bp, Homo Sapiens
  misc_feature 78, 81, 89: n = A,T,C or G
aattgggccctctacatgcatgctcgagcggccgccagtgtgatggatatctgcagaattcggctttttttttttttnagnactggatna

SEQ ID NO: 1637 - DNA, 104 bp, Homo Sapiens
  misc_feature 87, 91, 98, 103, 104: n = A,T,C or G
tctagatgcatgctcgagcggccgccagtgtgatggatatctgcagaattaagccgaattccagcacactggcggccgctcgagcangctnctagcgncgcgnn

SEQ ID NO: 1638 - DNA, 180 bp, Homo Sapiens
atgctcgagcggccgccagtgtgatggatatctgcagaattcggcttgatccagtacctaccttacagggattataattactccttggtgatgggagcttgttgtgagaatgttattggatatatgcccatcccctgttggagtggcaggaccccttttgcttagatgaaaaaaaaaaaa

SEQ ID NO: 1639 - DNA, 161 bp, Homo Sapiens
  misc_feature 132, 133, 144, 148: n = A,T,C or G
cctctagatgcatgctcgagcggccgccagtgtgatggatatctgcagaattcggcttgatccagtaccggaagaagaaacagctcatgaggctacggaaacaggccgagaagaacgtgaaaaaaaaaaaannccgatttccancccnttggcggccgttc

SEQ ID NO: 1640 - DNA, 199 bp, Homo Sapiens
  misc_feature 195, 197, 199: n = A,T,C or G
ccctctagatgcatgctcgagcggccgccagtgtgatggatatctgcagaattcggcttgatccagtacctaccttacagggattataattactccttggtgatgggagcttgttgtgagaatgttattggatatatgcccatccctgttggagtggcaggacccctttgcttagatgaaaaaaaaaaaaagccnantn

SEQ ID NO: 1641 - DNA, 211 bp, Homo Sapiens
  misc_feature 198, 203, 209, 211: n = A,T,C or G
ttgggccctctagctgcatgctcgagcggccgccagtgtgatggatatctgcagaattcggcttgatccagtacccaaatataagaattgaaaagacagtattcagaagggggagcatagaaagaaatctaaaaataaatggaacttaagtgtctatcaaagatggtgtggcagattacttgtgaaaaaaaaaaaaanccganttccancn

SEQ ID NO: 1642 - DNA, 194 bp, Homo Sapiens
  misc_feature 192, 193: n = A,T,C or G
gccctctagcatgcatgctcgagcggccgccagtgtgatggatatctgcagaattcggcttgatccagtaccaagaaaggaaatgtgcagggtatttttgaaaaattgccttattctgcacccatctctagaggcaacggaaactttaaattcttttcattgtcacagagagttacctgaaaaaaaaaaaannc

SEQ ID NO: 1643 - DNA, 264 bp, Homo Sapiens
  misc_feature 197, 205, 207, 225, 238, 255, 258, 264: n = A,T,C or G
ccctctagatgcatgctcgagcggccgccagtgtgatggatatctgcagaattcggcttgatccagtacctaccttacagggattataattactccttggtgatgggagcttgttgtgagaatgttattggatatatgcccatccctgttggagtggcaggacccctttgcttagatgaaaaaaaaaaaaagccganttccagcncnctggcggccgttactagnggatccgagcttnggtaccaagcttggcgnaancatggn

SEQ ID NO: 1644 - DNA, 152 bp, Homo Sapiens
  misc_feature 95: n = A,T,C or G
attgggccctctagatgcatgctcgagcggccgccagtgtgatggatatctgcagaattaagccgaattccagcacactggcggccgttacgtantggatccgagctcggtaccaagcttggctgtaatcatggtcatagctgtttcctgac

SEQ ID NO: 1645 - DNA, 240 bp, Homo Sapiens
  misc_feature 182, 214, 219, 225, 234, 236, 240: n = A,T,C or G
aattgggccctctagctgcatgctcgagcggccgccagtgtgatggatatctgcagaattcggcttgatccagtacgtacagcaagattcctgcccacaggaagggccacaggcccgctaagccccaaaggcaggatctagatgatgatgaacatgattatgaaaaaaaaaaaaagccggantttcagcacacttgggggccgttattagtggnttccngacctnggtaccaangnttgn

SEQ ID NO: 1646 - DNA, 200 bp, Homo Sapiens
  misc_feature 138, 153, 179, 187, 190, 200: n = A,T,C or G
ctctacatgcatgctcgagcggccgccagtgtgatggatatctgcagaattcggcttaaagacaacttctgttaatcaataaatatcctttcctttctgtactggatcaagccgaattccagcacactggccggccgntactatgtggatccngagctcggtaccatagccttggcgtnactcattngcncattattctn

SEQ ID NO: 1647 - DNA, 152 bp, Homo Sapiens
  misc_feature 148: n = A,T,C or G
aattgggccctctagctgcatgctcgagcggccgccagtgtgatggatatctgcagaattcggcttgatccagtaccggaagaagaaacagctcatgaggctaccggaaacaggccgagaagtaccgtgaaaaaaaaaaaaagccganttcc

SEQ ID NO: 1648 - DNA, 217 bp, Homo Sapiens
  misc_feature 177, 192, 201, 208, 217: n = A,T,C or G
gccctctagcatgcatgctcgagcggccgccagtgtgatggatatctgcagaattcggcttgatccagtacgtacagcaagattcctgcccacaggaagggccacaggcccgctaagccccaaaggcaggatctagatgatgatgaacatgattatgaaaaaaaaaaaaagccgganttccagcacactggnggccgttantagtggntccgagctn

SEQ ID NO: 1649 - DNA, 181 bp, Homo Sapiens
  misc_feature 180: n = A,T,C or G
gcgaattgggccctctagcatgcatgctcgagcggccgccagtgtgatggatatctgcagaattcggcttgatccagtacgtacagcaagattcctgcccacaggaagggccacaggcccgctaagccccaaaggcaggatctagatgatgatgaacatgattatgaaaaaaaaaaaaanc

SEQ ID NO: 1650 - DNA, 140 bp, Homo Sapiens
  misc_feature 138, 139: n = A,T,C or G
ttgggccctctagctgcatgctcgagcggccgccagtgtgatggatatctgcagaattcggcttgatccagtaccggaagaagaaacagcttatgaggctacggaaacaggccgagaagaacgtgaaaaaaaaaaaannc

SEQ ID NO: 1651 - DNA, 178 bp, Homo Sapiens
ggcgattgggccctctagctgcatgctcgagcggccgccagtgtgatggatatctgcagaattcggcttgatccagtactaaataggtgggttaaatgtggtaattctagttcagtgtcttaccctgaagagaaagttgtaggtccggcctgtgaaaaaaaaaaaaagccggaattcc

SEQ ID NO: 1652 - DNA, 191 bp, Homo Sapiens
ggcgaattgggccctctagcatgcatgctcgagcggccgccagtgtgatggatatctgcagaattcggcttgatccagtaccggaagaagaaacagctcatgaggctacggaattccagcacactggcggccgttactagtggatccgagctcggtaccaagctttggcgtaatcatggtcatagctgttt

SEQ ID NO: 1653 - DNA, 143 bp, Homo Sapiens
  misc_feature 90, 96, 106: n = A,T,C or G
gccctctagcatgcatgctcgagcggccgccagtgtgatggatatctgcagaattagccgaattccagcacactggcggccgttacgtantggatncgagctcggnaccaagcttggcgtaatcatggtcatagctgtttcct

SEQ ID NO: 1654 - DNA, 260 bp, Homo Sapiens
gccctctagcatgcatgctcgagcggccgccagtgtgatggatatctgcagaattcggcttgatccagtacagagagaagaggaatgactgcatgaatctacctgagttgctggcattgggaggccagttactggagaggaatggaaacatcttcaaaacttggtactggatcaagccgaattccagcacactgggcggccgttactagtggatccgagctcggtaccaagcttggcgtaatcatggtcatagctgtttc

SEQ ID NO: 1655 - DNA, 16 bp, Homo Sapiens
  misc_feature 7, 10, 16: n = A,T,C or G
aaaaatnccnaaaaan

SEQ ID NO: 1656 - DNA, 37 bp, Homo Sapiens
  misc_feature 4, 15, 21, 28, 35, 37: n = A,T,C or G
agcnggccccccccngggggnggggganttttgcngn

SEQ ID NO: 1657 - DNA, 22 bp, Homo Sapiens
  misc_feature 1, 14, 17, 22: n = A,T,C or G
nccccccccccccncgngaaan

SEQ ID NO: 1658 - DNA, 24 bp, Homo Sapiens
  misc_feature 6, 16, 20, 24: n = A,T,C or G
cccccngggggggggntttncggn

SEQ ID NO: 1659 - DNA, 26 bp, Homo Sapiens
  misc_feature 2, 23, 24, 26: n = A,T,C or G
cnccccccccggggggggaattnngn

SEQ ID NO: 1660 - DNA, 80 bp, Homo Sapiens
  misc_feature 19, 29, 39, 40, 54, 65, 73, 79, 80: n = A,T,C or G
ccccccccccccccggggngggaaatttnccaaaaatgnntttattttcccccncccgggggggncccccggngggggnn

SEQ ID NO: 1661 - DNA, 78 bp, Homo Sapiens
  misc_feature 2, 11, 22, 38, 53, 71, 76, 78: n = A,T,C or G
cnccccccccngggggggaaancccccaaacccccccntttttttttttttgngggccccccccccggggnccccngn

SEQ ID NO: 1662 - DNA, 24 bp, Homo Sapiens
  misc_feature 2, 20: n = A,T,C or G
cncgggccccccccgggggngggg

SEQ ID NO: 1663 - DNA, 209 bp, Homo Sapiens
  misc_feature 5, 14, 54, 85, 99, 100, 118, 127, 150, 160, 161, 188, 205,209: n = A,T,C or G
ttcgnaaaattggntgtttcccccccccccgggggggggggggggggataaggncccccctttttttttggggaaaaaaaaaaanaccccccaattaannaaaaaacccggggccctnttttttttntcccgggggggaaaaaaaaaaangggggttttnnctcccccgggggggggggggggggggnggttttggggggggggncccn

SEQ ID NO: 1664 - DNA, 40 bp, Homo Sapiens
  misc_feature 3, 16, 21, 35, 38: n = A,T,C or G
ttntctcttgaaaaanaaccntttttttttttttntancc

SEQ ID NO: 1665 - DNA, 34 bp, Homo Sapiens
  misc_feature 4, 10, 14, 28, 33, 34: n = A,T,C or G
ttgngggggncccncggggggggggggnttttnn

SEQ ID NO: 1666 - DNA, 69 bp, Homo Sapiens
  misc_feature 6, 11, 28, 45, 49, 62, 63, 69: n = A,T,C or G
ggaatntcccnaaaaaagggggggggtnccccccccccccccggngggnggggggggggggnnaaaaan

SEQ ID NO: 1667 - DNA, 33 bp, Homo Sapiens
  misc_feature 11, 19, 27, 32, 33: n = A,T,C or G
accccaaaatnttgggggnccccccanagggnn

SEQ ID NO: 1668 - DNA, 67 bp, Homo Sapiens
  misc_feature 3, 56: n = A,T,C or G
gcnccccccggggggggggattccccccgaaaaaatttcccccccccgtggggggnggcgggggggg

SEQ ID NO: 1669 - DNA, 73 bp, Homo Sapiens
  misc_feature 8, 51, 66, 68, 73: n = A,T,C or G
ggaatttntcccaaaaaaaaattttccccccccccctgggggggggggggnggggggggggggaantntaagn

SEQ ID NO: 1670 - DNA, 31 bp, Homo Sapiens
  misc_feature 6, 15: n = A,T,C or G
ttaaangggggcccncccggggggggggaaa

SEQ ID NO: 1671 - DNA, 23 bp, Homo Sapiens
  misc_feature 3, 19: n = A,T,C or G
gcnccccccgggggggggnattc

SEQ ID NO: 1672 - DNA, 33 bp, Homo Sapiens
  misc_feature 24, 26, 33: n = A,T,C or G
gggaaatttttaaaaaaaaggggntntttaaan

SEQ ID NO: 1673 - DNA, 31 bp, Homo Sapiens
  misc_feature 23, 31: n = A,T,C or G
aaaaatttttttttttttttttnaaaagggn

SEQ ID NO: 1674 - DNA, 15 bp, Homo Sapiens
  misc_feature 4, 9, 14, 15: n = A,T,C or G
aaantgccnaaaann

SEQ ID NO: 1675 - DNA, 33 bp, Homo Sapiens
  misc_feature 1, 7, 20, 25, 32, 33: n = A,T,C or G
nccgggnccccccggggggnggggnaaacccnn

SEQ ID NO: 1676 - DNA, 17 bp, Homo Sapiens
  misc_feature 8, 16, 17: n = A,T,C or G
gggagggnaatttttnn

SEQ ID NO: 1677 - DNA, 38 bp, Homo Sapiens
  misc_feature 4, 16, 20, 35: n = A,T,C or G
aaancccccaaaaaanaccntttttttttttcccncgg

SEQ ID NO: 1678 - DNA, 23 bp, Homo Sapiens
  misc_feature 14, 21, 23: n = A,T,C or G
ggggaaattttttncaaaaanan

SEQ ID NO: 1679 - DNA, 18 bp, Homo Sapiens
  misc_feature 9, 10, 18: n = A,T,C or G
aaatttccnnaaaaaaan

SEQ ID NO: 1680 - DNA, 127 bp, Homo Sapiens
  misc_feature 5, 23, 35, 47, 71, 83, 105, 108, 119: n = A,T,C or G
gcccncgggggggggggattcgnaaaaaggggttncccccccccggngggggggggggaaaaaaaaccccncaaaaagggggntttttttccccccctttttttnccnccctttggggngggggggg

SEQ ID NO: 1681 - DNA, 50 bp, Homo Sapiens
  misc_feature 40, 47: n = A,T,C or G
ttaattccagcacactggcggccgctcctaccggatctcnagctcgntaa

SEQ ID NO: 1682 - DNA, 34 bp, Homo Sapiens
  misc_feature 27: n = A,T,C or G
ttaattccagcacactggcggccgctnctactgc

SEQ ID NO: 1683 - DNA, 58 bp, Homo Sapiens
  misc_feature 53, 56, 58: n = A,T,C or G
ttctttctacccacaacactttctcggcaaaaaaaaaaaaagccgaattcaancanan

SEQ ID NO: 1684 - DNA, 86 bp, Homo Sapiens
  misc_feature 68, 69, 82, 83, 86: n = A,T,C or G
ttctttctaccccatcatcttccacagttctggcaaaaaaaaaaaaaaaaaaaaaagggggggggggnnaaaaaaaaaaaanncgn

SEQ ID NO: 1685 - DNA, 118 bp, Homo Sapiens
  misc_feature 27, 41, 45, 59, 80: n = A,T,C or G
cccaaccgggcccccccccggggggangggggaaaaccccncccnaaaaacccgccccnttttttttttttttttccttngggggggcccccccttataaatgggacccccccccaaa

SEQ ID NO: 1686 - DNA, 97 bp, Homo Sapiens
  misc_feature 6, 14, 34, 62, 71, 91, 92, 97: n = A,T,C or G
cccccncccccccnggggggggggaaaccccccnaaaaccccctttttttttttttcccctncgggccccncaaaaaaaggccccccccannagggn

SEQ ID NO: 1687 - DNA, 20 bp, Homo Sapiens
  misc_feature 17: n = A,T,C or G
aaaacaaaaaaaagaanaaa

SEQ ID NO: 1688 - DNA, 31 bp, Homo Sapiens
  misc_feature 5, 16, 18, 26: n = A,T,C or G
aaatngggttttttanancctttttngaaaa

SEQ ID NO: 1689 - DNA, 44 bp, Homo Sapiens
  misc_feature 19, 29: n = A,T,C or G
ttttttttttttttttttngggggggganaaaggggcgaatttt

SEQ ID NO: 1690 - DNA, 127 bp, Homo Sapiens
  misc_feature 7, 24, 81, 92, 109, 114, 121, 126, 127: n = A,T,C or G
aaaatgngcttttttttttttttnccccccccccccctttttttttttttccccaaaaaaaagggggggccttttaaaaanaaaaccctttnttttggggggggggggnaagcncgaattnccccnn

SEQ ID NO: 1691 - DNA, 90 bp, Homo Sapiens
  misc_feature 13, 30, 33, 47, 69, 82, 86, 90: n = A,T,C or G
gaatttttttcgnaaaattgggggtgggtnccnccccccccggcccnccccttttttttggggccgcgnttttttttcccantttngggn

SEQ ID NO: 1692 - DNA, 74 bp, Homo Sapiens
  misc_feature 9, 59, 62, 71: n = A,T,C or G
aaaaaaacnttttttttttttttttccaaaaaaaaaaaaaaaaaaaaaagggggggggnttnttctccccnccc

SEQ ID NO: 1693 - DNA, 43 bp, Homo Sapiens
  misc_feature 5, 14, 21, 35, 37, 43: n = A,T,C or G
ccccngaaggcccnggcgggntttttccccaaccncncgcccn

SEQ ID NO: 1694 - DNA, 76 bp, Homo Sapiens
  misc_feature 19, 24, 34, 40, 49, 61, 69, 75: n = A,T,C or G
ccccccgggggggggaatnctccnaaaaaaaaancccaanttccccccncccggggggggngggcgggngggggnt

SEQ ID NO: 1695 - DNA, 20 bp, Homo Sapiens
  misc_feature 1, 13, 14, 20: n = A,T,C or G
naaaaaaattttnnttccgn

SEQ ID NO: 1696 - DNA, 27 bp, Homo Sapiens
  misc_feature 4, 8, 18, 24, 27: n = A,T,C or G
gggngggngggggggggnaaaatnggn

SEQ ID NO: 1697 - DNA, 85 bp, Homo Sapiens
  misc_feature 4, 11, 35, 36, 53, 57, 72, 80, 83, 85: n = A,T,C or G
ttcncccgccnaaaaattttttttttttttttttnncccgttttttttttttnaaanaaaaattttttttanagtttccnggnan

SEQ ID NO: 1698 - DNA, 110 bp, Homo Sapiens
  misc_feature 3, 12, 16, 24, 29, 52, 60, 73, 76, 84, 104, 105, 110: n = A,T,C or G
cgncccccccgngggnggggaatntcccnaaaaaaacccaatcccccccccnggggggcnggggggggggggntcngggggggncccccaacctgggggaaaannggggn

SEQ ID NO: 1699 - DNA, 27 bp, Homo Sapiens
  misc_feature 3, 4, 17, 21: n = A,T,C or G
ggnngggaaaattttanaaanaaattt

SEQ ID NO: 1700 - DNA, 18 bp, Homo Sapiens
  misc_feature 9, 10, 18: n = A,T,C or G
ccccccccnncccccccn

SEQ ID NO: 1701 - DNA, 23 bp, Homo Sapiens
  misc_feature 3, 16, 17, 23: n = A,T,C or G
ccncccccgggggggnntttttn

SEQ ID NO: 1702 - DNA, 45 bp, Homo Sapiens
  misc_feature 8, 12, 21, 30, 38, 44: n = A,T,C or G
tttttccntttnttttttttntaaaaaaantttggggngaaaant

SEQ ID NO: 1703 - DNA, 55 bp, Homo Sapiens
  misc_feature 26, 27, 43, 52: n = A,T,C or G
cccaacccggccccccccccgggggnnggggaaatccccccgnaaaaattgncct

SEQ ID NO: 1704 - DNA, 93 bp, Homo Sapiens
  misc_feature 3, 13, 15, 52, 58, 65, 72, 80: n = A,T,C or G
ggngggaaatccncnaaaaattttttccccccgggggggggggtttttttanaaaacnacccccnggagggngttttttncccgggccgcggg

SEQ ID NO: 1705 - DNA, 147 bp, Homo Sapiens
  misc_feature 2, 16, 37, 39, 51, 58, 62, 68, 74, 80, 102, 104, 119: n = A,T,C or G
gnccccccccgggggngggaaaaccccaaaaaaaccncntttttttttttnccccccncaanaaaccntttttnaaaaangggggggggcaaaaaaaaaccntnaaaaaacccccaaancccccccccccggggggggggggggggg

SEQ ID NO: 1706 - DNA, 79 bp, Homo Sapiens
  misc_feature 15, 24, 28, 44, 45, 70, 77: n = A,T,C or G
ggggaaaattccccnaaaaaacgncccntttttttttttttttnncccccccccaaaaaaaaaaaaaccnggggggnaa

SEQ ID NO: 1707 - DNA, 24 bp, Homo Sapiens
  misc_feature 3, 15, 23, 24: n = A,T,C or G
ggngggaaaaccccnaaaaaaann

SEQ ID NO: 1708 - DNA, 121 bp, Homo Sapiens
  misc_feature 5, 6, 24, 33, 42, 50, 67, 76, 79, 109, 110: n = A,T,C or G
ccccnncccccccccggggggggnaaacccccnaaaaaaggncccccctnttttggggggttttttntcccggggnaanaaccccaattcccccccccccggggggggnnggggggggggg

SEQ ID NO: 1709 - DNA, 34 bp, Homo Sapiens
  misc_feature 10, 14: n = A,T,C or G
ccccaaaaanaaanttttttcccccccccccctt

SEQ ID NO: 1710 - DNA, 37 bp, Homo Sapiens
  misc_feature 4, 22, 33: n = A,T,C or G
ttcntttaccgggccccccccnggggggggggnattt

SEQ ID NO: 1711 - DNA, 30 bp, Homo Sapiens
  misc_feature 13, 16, 26, 27, 30: n = A,T,C or G
gggggggggaatnttncgaaaaaatnnttn

SEQ ID NO: 1712 - DNA, 15 bp, Homo Sapiens
  misc_feature 11, 12, 15: n = A,T,C or G
ggggaattttnnggn

SEQ ID NO: 1713 - DNA, 23 bp, Homo Sapiens
  misc_feature 1, 4, 14, 22, 23: n = A,T,C or G
nttntggggaaaanaggggggnn

SEQ ID NO: 1714 - DNA, 31 bp, Homo Sapiens
gggaaattttttcaaaaataaatttccaacc

SEQ ID NO: 1715 - DNA, 75 bp, Homo Sapiens
  misc_feature 8, 35, 62, 71: n = A,T,C or G
taccgggnccccccccgggggggggggaattttcncgaaaaattggggtttaacccccctgnggggccggntttt

SEQ ID NO: 1716 - DNA, 27 bp, Homo Sapiens
  misc_feature 1, 5, 18, 26, 27: n = A,T,C or G
ngggnggggaatcccccnaaattccnn

SEQ ID NO: 1717 - DNA, 19 bp, Homo Sapiens
  misc_feature 17: n = A,T,C or G
ggaaaaaaaaaggggtntt

SEQ ID NO: 1718 - DNA, 26 bp, Homo Sapiens
  misc_feature 3, 9, 20, 22, 26: n = A,T,C or G
ganaaaaanagggggggttncntctn

SEQ ID NO: 1719 - DNA, 25 bp, Homo Sapiens
  misc_feature 9, 19, 21, 25: n = A,T,C or G
aattctgcngaaaatgggntnggtn

SEQ ID NO: 1720 - DNA, 27 bp, Homo Sapiens
  misc_feature 3, 12, 22: n = A,T,C or G
cgnccccccccngggggggganttttt

SEQ ID NO: 1721 - DNA, 76 bp, Homo Sapiens
  misc_feature 6, 37, 66: n = A,T,C or G
gaattnttgggaaaaatgggggggtttcccccccccncccttttttttaaccccccccgggggggnggaaaaaaaa

SEQ ID NO: 1722 - DNA, 24 bp, Homo Sapiens
  misc_feature 5, 14, 21: n = A,T,C or G
agggnaattttttntaaaatnaat

SEQ ID NO: 1723 - DNA, 222 bp, Homo Sapiens
  misc_feature 47, 50, 88, 115, 134, 166, 181, 192: n = A,T,C or G
cccccccccgccttttttgggggggcccccaaaaagaaaaaaccccnaancgggcccccccccggggggggggggaaaattccccccnaaaattttttttttttttttttttttnttcaaaaaaaaaaaaaacncccccccggggggggggggggggggggggggnttttttttaaaaaanccccccccccncggggggggggtttttttccgggggggggg

SEQ ID NO: 1724 - DNA, 107 bp, Homo Sapiens
  misc_feature 10, 11, 21, 33, 35, 53, 82, 88, 101, 103, 107: n = A,T,C or G
tcggaaaaanngggggtgttncccccccccccncnccccttttttttaaaccnccccccgggggcgggaaaaaaaaaaaaancccccnttttttggtttcncncggn

SEQ ID NO: 1725 - DNA, 54 bp, Homo Sapiens
  misc_feature 5, 25, 28, 45, 52, 54: n = A,T,C or G
ggggnaaatccccccaaaaaaaggnccntttttttttttttttcnccccccnan

SEQ ID NO: 1726 - DNA, 158 bp, Homo Sapiens
  misc_feature 15, 34, 55, 59, 74, 101, 119, 123, 139, 151: n = A,T,C or G
ggaaaattggggggntttccccccccccttaaanccctccttttttgggggcccncccntttgggccggggggnttttttttaaaaaaaacccgggggctnggggcccccggtttttanaaanaccggggggggaaaancccccccccccncgggggg

SEQ ID NO: 1727 - DNA, 56 bp, Homo Sapiens
  misc_feature 7, 17, 31, 53: n = A,T,C or G
aaatttnaaaaaaaacntttttttttttttntaaaattccgggggaaaaaaanaaa

SEQ ID NO: 1728 - DNA, 42 bp, Homo Sapiens
  misc_feature 2, 6, 17, 34, 41, 42: n = A,T,C or G
cncccnggggggggacntcggaaaatggggggtnccccccnn

SEQ ID NO: 1729 - DNA, 28 bp, Homo Sapiens
  misc_feature 1, 8, 21, 22, 28: n = A,T,C or G
ntttcccnaaaaaattggccnntttttn

SEQ ID NO: 1730 - DNA, 227 bp, Homo Sapiens
  misc_feature 4, 9, 16, 27, 30, 52, 61, 68, 79, 84, 97, 103, 109, 158,166, 180, 195, 208, 218, 226, 227: n = A,T,C or G
gggnaattnttccggnaaaaatcgggngtntttttcttcccccctaaggganaaagggggnggggccnttttttggtanttttntgggggggggggngccccncccccntttgtggggcccccccccccccccccccggggggggggggaaaaatttnaaaaaccncccggggggggggnggggggggggaaaanttttttccccccncagggggggnaaaaaaann

SEQ ID NO: 1731 - DNA, 25 bp, Homo Sapiens
  misc_feature 16, 21, 25: n = A,T,C or G
cccaccggcccccccnggggngggn

SEQ ID NO: 1732 - DNA, 33 bp, Homo Sapiens
  misc_feature 1, 7, 24, 28, 33: n = A,T,C or G
nttttcncgaaaattgggctgttnttcnccccn

SEQ ID NO: 1733 - DNA, 56 bp, Homo Sapiens
  misc_feature 12, 32: n = A,T,C or G
tttttttacggnccccccgggggggggggaanttttttaaaaaaaaaaccccaaat

SEQ ID NO: 1734 - DNA, 25 bp, Homo Sapiens
  misc_feature 6, 20, 24, 25: n = A,T,C or G
cccccnccccccccgggggngggnn

SEQ ID NO: 1735 - DNA, 104 bp, Homo Sapiens
  misc_feature 19, 21, 34, 49, 57, 72, 100: n = A,T,C or G
gggggggggaaaacccccncnaaaacccgccccntttttttttttttcngggggcgnaaacaaaaacccccnaaaaagggggggggggggaaaaaaaagncccc

SEQ ID NO: 1736 - DNA, 46 bp, Homo Sapiens
  misc_feature 12, 14, 25, 34: n = A,T,C or G
attaaagggggngnaaaacctccanccccccccntttggggggggg

SEQ ID NO: 1737 - DNA, 30 bp, Homo Sapiens
  misc_feature 28: n = A,T,C or G
cccccccccccgggggggaaaccccccnaa

SEQ ID NO: 1738 - DNA, 118 bp, Homo Sapiens
  misc_feature 13, 32, 48, 91, 111: n = A,T,C or G
ggggggggaaaanccccccaaaaacccccccntttttttttttccccncaaaaaaacccccaagggggggggggggaaaaaaaaccccaancccccccccccccggggggnccgccca

SEQ ID NO: 1739 - DNA, 62 bp, Homo Sapiens
  misc_feature 13, 44, 54, 61, 62: n = A,T,C or G
ccccccccccccngggggggaaaaccccccaaaacccccccccntttttttttntgggggnn

SEQ ID NO: 1740 - DNA, 103 bp, Homo Sapiens
  misc_feature 2, 21, 22, 33, 38, 50, 65, 77, 82, 98: n = A,T,C or G
cnaaaaaaaaaaacccctttnngtttttgcgcnccganaagaacaaaatnttttttttttggggnccgcaaaaaaanaaacnccaaaagggggggggnaaaaa

SEQ ID NO: 1741 - DNA, 41 bp, Homo Sapiens
  misc_feature 11, 34, 37, 41: n = A,T,C or G
tccttaccggnccccccccgggggggggggaatnccncccn

SEQ ID NO: 1742 - DNA, 113 bp, Homo Sapiens
  misc_feature 1, 12, 15, 22, 26, 38, 45, 56, 67, 75, 103: n = A,T,C or G
nggggaaccccnccnaaaacancccntttttttttttnccccctnaaaaagggggnggggggggggnaaaaaaancccaaatcccccccccccgggggggggngggggggggg

SEQ ID NO: 1743 - DNA, 66 bp, Homo Sapiens
  misc_feature 10, 21, 25, 34, 35, 44, 52, 61, 65, 66: n = A,T,C or G
ggaatttccncaaaaaatcgngggngggttccgnnccccaaagnggaaaggngggggggcntttnn

SEQ ID NO: 1744 - DNA, 32 bp, Homo Sapiens
  misc_feature 3, 12, 19, 31: n = A,T,C or G
ttngaaaaaaanttttttntttttttttttnc

SEQ ID NO: 1745 - DNA, 38 bp, Homo Sapiens
  misc_feature 1, 18, 20, 34: n = A,T,C or G
nttttttttttttttttncnccgttttttttganaaaa

SEQ ID NO: 1746 - DNA, 55 bp, Homo Sapiens
  misc_feature 19, 34, 35, 47, 54, 55: n = A,T,C or G
ttttttttttttttttttngggaaaaaaaaaccnncaaattttcccnccttttnn

SEQ ID NO: 1747 - DNA, 164 bp, Homo Sapiens
  misc_feature 14, 39, 43, 63, 69, 75, 81, 99, 100, 124, 134, 141, 158,163, 164: n = A,T,C or G
gggaaattttgcgnaaaaaaagggggggggggtttggancccncccggggccccccctttttntggggntttttngggggncccccccccccttttttnnaaaaaaaaaaagggggggaccgcngggggggggnaaaaaanttttttttttttttttnccttnn

SEQ ID NO: 1748 - DNA, 43 bp, Homo Sapiens
  misc_feature 1, 3, 11, 18, 25, 34, 37, 43: n = A,T,C or G
ntntaacggcncccccanggggggngggaatttnttnaaaaan

SEQ ID NO: 1749 - DNA, 37 bp, Homo Sapiens
  misc_feature 6, 28, 30, 37: n = A,T,C or G
cccggncccccggggggggggaaaaccncnaaaaaan

SEQ ID NO: 1750 - DNA, 16 bp, Homo Sapiens
  misc_feature 7, 10, 16: n = A,T,C or G
taaaaanttnattttn

SEQ ID NO: 1751 - DNA, 20 bp, Homo Sapiens
  misc_feature 20: n = A,T,C or G
ggaaatccccccaaaaaaan

SEQ ID NO: 1752 - DNA, 97 bp, Homo Sapiens
  misc_feature 5, 13, 44, 63, 86, 89, 96, 97: n = A,T,C or G
cccgnggggcccncgggggggggggaaaaaggaaaaaaaaaccnttttttttttttttctccnaccccccgcccccccaaaggggnaanggggggnn

SEQ ID NO: 1753 - DNA, 43 bp, Homo Sapiens
  misc_feature 8, 16, 23, 37, 38, 43: n = A,T,C or G
taaccggncccccccnggggggnggggaaattttccnnaaaan

SEQ ID NO: 1754 - DNA, 57 bp, Homo Sapiens
  misc_feature 11, 22, 28, 39, 48, 53: n = A,T,C or G
aaaaaaaaccnggtgggaattngggttnaaaaacccccntttgggggnccccnaaaa

SEQ ID NO: 1755 - DNA, 279 bp, Homo Sapiens
  misc_feature 1, 12, 35, 46, 61, 75, 84, 106, 112, 123, 162, 164, 172,188, 203, 206, 269: n = A,T,C or G
ncggggcccccnggggggggggggaattccgcggnaaaaacggccnttttttttttttttnccccccgcggcccnaaaaaaacncccccccccaaaaaaaactttntttttnctttttccccnccggggggaaaaaatttttttccccccccccccaggggngngggggganagggtttaaaaaaggnggggcccctttaaanaanataaatgggcccccgggggggggaaaaaaaggcgaattcccccccccccgggggggggggggncctaagaggg

SEQ ID NO: 1756 - DNA, 33 bp, Homo Sapiens
  misc_feature 5, 21: n = A,T,C or G
ccccngcccccccccgggggngggggaattttt

SEQ ID NO: 1757 - DNA, 36 bp, Homo Sapiens
  misc_feature 12, 19, 26: n = A,T,C or G
cctccaacccgnccccccnggggggnggggaaattt

SEQ ID NO: 1758 - DNA, 29 bp, Homo Sapiens
  misc_feature 6, 27: n = A,T,C or G
gggggnggggaatttttccccaaaatnaa

SEQ ID NO: 1759 - DNA, 60 bp, Homo Sapiens
  misc_feature 19, 42, 54, 55, 60: n = A,T,C or G
gggattttcccccgaaaanaattttccccccccctgggggcncccccttatttnnttccn

SEQ ID NO: 1760 - DNA, 35 bp, Homo Sapiens
  misc_feature 6, 7, 29, 30, 35: n = A,T,C or G
cccccnnccccccccgggggggggggaannccccn

SEQ ID NO: 1761 - DNA, 81 bp, Homo Sapiens
  misc_feature 1, 11, 16, 58, 63, 76: n = A,T,C or G
ngggggaaacnccccnaaaaaaaaaacccttttttttttttttccccccccggggggnaaaangggcccccccccnttttt

SEQ ID NO: 1762 - DNA, 15 bp, Homo Sapiens
ttggaaaattttcct

SEQ ID NO: 1763 - DNA, 87 bp, Homo Sapiens
  misc_feature 16, 27, 44, 48, 63, 76, 81: n = A,T,C or G
cccgccccccccccgngggggggaaanaccccccaaaaaaagcncccnttttttttttttacnccccccccccccnccccncaaaaa

SEQ ID NO: 1764 - DNA, 47 bp, Homo Sapiens
  misc_feature 8, 16, 40, 45: n = A,T,C or G
ttaaccgncccccccncggggggaagggaaattttccggnaaaanaa

SEQ ID NO: 1765 - DNA, 42 bp, Homo Sapiens
  misc_feature 9, 10, 36, 37, 42: n = A,T,C or G
ggggatttnnggggaaaaaggggggggggtcccccnnccccn

SEQ ID NO: 1766 - DNA, 43 bp, Homo Sapiens
  misc_feature 9, 25, 35, 37, 43: n = A,T,C or G
tctttttancgggccccccccgggnggggggggantntttccn

SEQ ID NO: 1767 - DNA, 41 bp, Homo Sapiens
  misc_feature 13, 37, 39: n = A,T,C or G
aaaaaaaaatttnaaaaaaaaaatggggggggggggngnaa

SEQ ID NO: 1768 - DNA, 24 bp, Homo Sapiens
  misc_feature 5, 15, 20, 24: n = A,T,C or G
aattngccgttttcnccccncccn

SEQ ID NO: 1769 - DNA, 30 bp, Homo Sapiens
  misc_feature 23, 29, 30: n = A,T,C or G
ggtttttttcccgaaattggggnttcccnn

SEQ ID NO: 1770 - DNA, 26 bp, Homo Sapiens
  misc_feature 1, 4: n = A,T,C or G
ntcntccccccccccccccccccggg

SEQ ID NO: 1771 - DNA, 34 bp, Homo Sapiens
  misc_feature 2, 15, 27, 28, 34: n = A,T,C or G
cngcccccccggggngggggttttttnncgaaan

SEQ ID NO: 1772 - DNA, 187 bp, Homo Sapiens
  misc_feature 174, 179: n = A,T,C or G
ctctagatgcatgctcgagcggccgccagtgtgatggatatctgcagaattcggcttctgcttgatgttaaatgaaaattaaaagaagttatagtttttattctctcaaatctattgtctgttggcaagatcctattttatatgcccaaaaaaaaaaaaagccgaattccagcncactnggcggccg

SEQ ID NO: 1773 - DNA, 106 bp, Homo Sapiens
  misc_feature 6, 12, 33, 35, 51, 73, 82, 83, 94, 102: n = A,T,C or G
gggggnccaagnccccccccggccccccaaatntntttttcccttttttgnaaaaaaggggaaaccccctttntgggggggnnttttttttaanaaaaaggngggg

SEQ ID NO: 1774 - DNA, 44 bp, Homo Sapiens
  misc_feature 7, 16, 21: n = A,T,C or G
ttttttncccccgggnaaacnggggttttaaggggggggggggg

SEQ ID NO: 1775 - DNA, 40 bp, Homo Sapiens
  misc_feature 2, 20, 35, 39, 40: n = A,T,C or G
gntttttttttttttttaanccccccccccccccntttnn

SEQ ID NO: 1776 - DNA, 35 bp, Homo Sapiens
  misc_feature 13, 30, 33, 35: n = A,T,C or G
ttttttttttttnccccccccccccccccnagngn

SEQ ID NO: 1777 - DNA, 47 bp, Homo Sapiens
  misc_feature 11, 13, 30, 41: n = A,T,C or G
ggggggggggncnaaaggcccccccccggngcccaaaattntttttt

SEQ ID NO: 1778 - DNA, 34 bp, Homo Sapiens
  misc_feature 3, 26, 29, 34: n = A,T,C or G
aantttttttttttttttaagggggnggngggan

SEQ ID NO: 1779 - DNA, 48 bp, Homo Sapiens
  misc_feature 4, 16, 29, 32: n = A,T,C or G
cccngggccccccggnaaaaaaaaaaaanggnttttttatttggggcc

SEQ ID NO: 1780 - DNA, 47 bp, Homo Sapiens
  misc_feature 6, 10, 28, 30, 40, 43: n = A,T,C or G
cggganccanaaattgggaccgggaatnanccccaagccntanaaga

SEQ ID NO: 1781 - DNA, 122 bp, Homo Sapiens
  misc_feature 3, 23, 32, 40, 56, 75, 81, 94, 122: n = A,T,C or G
ccntttcccaaaaaaaaaagggngttttttgnaaggtccncccccccccttgggcnttccccttgggggggaaantttaanagggccccccttngggggaaaaaaaaaaaaaaggggggggn

SEQ ID NO: 1782 - DNA, 57 bp, Homo Sapiens
  misc_feature 9, 15, 49, 50, 57: n = A,T,C or G
ccggaaatncggggnggggccccccggcccccccccttaaatttttttnntttttan

SEQ ID NO: 1783 - DNA, 101 bp, Homo Sapiens
  misc_feature 5, 9, 30, 36, 44, 54, 72, 84, 92, 100, 101: n = A,T,C or G
gtttngggnttggggggccccggaaatttngggggnggggtccnagggccgggnaaaaaaaaaaaaaagggngggggggggggnttttgggncccccccnn

SEQ ID NO: 1784 - DNA, 37 bp, Homo Sapiens
cgaaaaacggggccgtaaattttttttagtttttttt

SEQ ID NO: 1785 - DNA, 132 bp, Homo Sapiens
  misc_feature 3, 18, 22, 40, 41, 55, 66, 67, 87, 91, 123, 131, 132: n = A,T,C or G
ggngggggaaaaaaaaanaaanaaaaaaccccttggcaannaaaggggggggganagggggggggnnctttttttttttcccaaaancccnaaaaaaaaacccggggggggggggggaaaaanccccccann

SEQ ID NO: 1786 - DNA, 127 bp, Homo Sapiens
  misc_feature 7, 22, 32, 44, 50, 54, 63, 69, 82, 83, 119: n = A,T,C or G
ggggggntatttttgaaattgngggaaaaggntttttggggccngggggngggntttaaaaanccaaanggggggggccccnncccccccccccccgggtttttttttttggggccccnaaaaaaaa

SEQ ID NO: 1787 - DNA, 51 bp, Homo Sapiens
  misc_feature 2, 13, 22, 30, 36, 51: n = A,T,C or G
gnaaatttggggntcgggaatntggggggnaagggntttttggggcccggn

SEQ ID NO: 1788 - DNA, 133 bp, Homo Sapiens
  misc_feature 68, 85: n = A,T,C or G
ttcgcagagatgtgtttaagtgctgtggccagaagcggggggagggggggtttggtggaaattttttnttatgatgtctgtgtgnaaagcggctgtgcagacattcaattgttattattatgtccaaaaaaaa

SEQ ID NO: 1789 - DNA, 145 bp, Homo Sapiens
ttgatcaagtcccaactatttgggaggctgaggcaggaggatcgcttgagcccaggagtttaaagctgcagtgccctgtggttgcacctgtgaataactgcactccagcctgggcaacatagcgagacctcatctccaaaaaaaa

SEQ ID NO: 1790 - DNA, 153 bp, Homo Sapiens
ttgatcaagtccctggtcaagtccccaggcaaagttcggcctacaactgggctcttcctagattcccttcccctactcatcgcactaatttacactcacaacaccctaggctcactaaacattctactactcactctcactgcccaaaaaaaa

SEQ ID NO: 1791 - DNA, 166 bp, Homo Sapiens
ttgatcaagtcccagccctattcctcaccagatgcctatctctcagagcctctgttttctccaatgtgtcgtgggaataaaaacacctatctcatgtagattgctaggagaggggaggattaatgaagacaaaatgaataaaagggcccatccccaaaaaaaaaaa

SEQ ID NO: 1792 - DNA, 31 bp, Homo Sapiens
agtttcgttcgtatcggatccagaattcgtg

SEQ ID NO: 1793 - DNA, 56 bp, Homo Sapiens
  misc_feature 18, 54, 55, 56: n = A,T,C or G
ttttttttttttcacagncagatcaataaaaagggttttttttttttttttttnnn

SEQ ID NO: 1794 - DNA, 122 bp, Homo Sapiens
  misc_feature 119, 121, 122: n = A,T,C or G
ttttttttttcacagtcagatcagtcagatcacacacctttattatcctcaaaatgtaacaaacgggataagaaatccccccccccctttttttttttttttttttttttttttttttnann

SEQ ID NO: 1795 - DNA, 37 bp, Homo Sapiens
tggtgtattcaagtccttatcctttacagtcagatca

SEQ ID NO: 1796 - DNA, 27 bp, Homo Sapiens
tgatctgactgtaaaggataaggacta

SEQ ID NO: 1797 - DNA, 42 bp, Homo Sapiens
  misc_feature 36, 41, 42: n = A,T,C or G
ttttttttttttttttttttttaaataaaaaaggcnctcgnn

SEQ ID NO: 1798 - DNA, 100 bp, Homo Sapiens
  misc_feature 18, 99: n = A,T,C or G
gcgatttgggccctctanctgcatgctcgagcggccgccagtgtgatggatatctgcagaattcggcttaattccagcacactggcggccgctcgtgcng

SEQ ID NO: 1799 - DNA, 240 bp, Homo Sapiens
  misc_feature 9, 207, 230, 237, 240: n = A,T,C or G
gtttcgttncgtatcggatccagaattcgtgattcatgcactcttctggctgacagcacaagagaaactcctagtttagacaactggtaagccagctcctcaccaattccactcgaggctccagtcacccacaccaccatatcagtcagatcaatgcctctgtttggaatcctcagaaccagtttttttttttttcacccccccccntttttttttttttttttttttanccctttncan

SEQ ID NO: 1800 - DNA, 64 bp, Homo Sapiens
  misc_feature 61, 63, 64: n = A,T,C or G
ttttttttttttcaccataggtctcttcagcattatgctccagttcccttttttttttttnann

SEQ ID NO: 1801 - DNA, 124 bp, Homo Sapiens
tgtattcatgtgtgtacagaggcctgaaggagtcaatgaagcccacatcagcagtcagatcattcttagttttttttttttcacagtcagatcattcttagttttttgggttacagtcagatca

SEQ ID NO: 1802 - DNA, 161 bp, Homo Sapiens
  misc_feature 83, 159, 160, 161: n = A,T,C or G
gtttcgttcgtatcggatccagaattcgtgattttttttttttcacagtcagatcattcagtcttgtaattaattcttgctgngatctgtattagcaatttcacaaacccatcagtttcttcattcgagttttggaatttttttttttttttttttttnnn

SEQ ID NO: 1803 - DNA, 68 bp, Homo Sapiens
  misc_feature 25, 28, 62, 64, 68: n = A,T,C or G
ttttttttttttcaccataggtctnttnagcattatgctccagttccctttttttttttttnanagcn

SEQ ID NO: 1804 - DNA, 341 bp, Homo Sapiens
  misc_feature 153, 181, 294, 307, 325, 327, 335, 338, 341: n = A,T,C or G
gcagtttcgttacgtatcggatccagaattcgtgattaaaaaactaagaatgatctgactgtgaaaaaaaaaaaaggaccttcaaataggagtgattgaaataaatgactaccttgcatgttatgctttcatttgggtggaatacttcatcanaataaactattgatctgactgctgatgngggcttcattgactccttcaggcctctgtacacacatgaatacaaaggaccaaaagcagacttaaagaaagatgagaagtctgaaaccaaaaagcaacagaagtcccgacagngaggaaaagtcanacaggggaaaaaaaaaananaccattcnccnccn

SEQ ID NO: 1805 - DNA, 204 bp, Homo Sapiens
  misc_feature 152, 170, 198, 202, 204: n = A,T,C or G
tgatctgactgaatacatttaaaagaaaatatattttgaaacctgttctgctatgaacagagataacatatctttttactatgctattggtttttaggttaagcttcctaatgcataataaatttacagtggtgaaaaaaaaaaaaactaanaatgatctgactgctgangggggcttcattgactccttcaggcctntgtncn

SEQ ID NO: 1806 - DNA, 80 bp, Homo Sapiens
  misc_feature 13, 17, 27, 35, 56, 71, 77, 80: n = A,T,C or G
ttttttttttttnaccntttccagctnatgcactnttctggctgacagcacaaganaaactcctagtttanacaacnggn

SEQ ID NO: 1807 - DNA, 71 bp, Homo Sapiens
  misc_feature 62, 68, 71: n = A,T,C or G
tcagtcagatcagcatacaccatgccagtcagatcattcttagttttttttttttttttaanagtcanatn

SEQ ID NO: 1808 - DNA, 194 bp, Homo Sapiens
  misc_feature 191: n = A,T,C or G
tattaataaggctctcgtcttgtatcttgtcaagtattaacaaggcacatttttcatgacctttactacaagccaaatgtaagggtgtattcaagtccttatcctttacagtcagatcaatgcctctgtttggaatcctcagaaccagttttttttttttcacagtcagatcaaatcagtcttccagtcanatc

SEQ ID NO: 1809 - DNA, 74 bp, Homo Sapiens
tgatctgactgtaacacaaaaaactaagaatgatctgactgtaaaggataaggacttgaatacacccttacata

SEQ ID NO: 1810 - DNA, 123 bp, Homo Sapiens
  misc_feature 103, 116, 121, 123: n = A,T,C or G
agttgcgttcgtatcggatccagaattcgtgattgatctgactgaaaaaaaaaaaactaagaatgatatgactgtttggagtgaaaaaaaaaaaaaaaaaaangggatctttccgngtttnan

SEQ ID NO: 1811 - DNA, 55 bp, Homo Sapiens
tctacaagccaaatgtaagggtgtattcaagtccttatcctttacagtcagatca

SEQ ID NO: 1812 - DNA, 58 bp, Homo Sapiens
tgatctgactgtaaaggataaggacttgaatacacccttacatttggcttgtagtaaa

SEQ ID NO: 1813 - DNA, 82 bp, Homo Sapiens
  misc_feature 8: n = A,T,C or G
gcagtttncgttacgtatcggatccagaattcgtgattgatctgactggaaaaaaaaaatttttttttttccagtcagatca

SEQ ID NO: 1814 - DNA, 36 bp, Homo Sapiens
  misc_feature 9: n = A,T,C or G
tgcagtttncgttacgtatcggatccagaattcgtg

SEQ ID NO: 1815 - DNA, 149 bp, Homo Sapiens
gcagttgcgttacgtatcggatccagaattcgtgattgatctgactgcaaaggataaggacttgaatacacccttacatttggcttgtagtaaaggtcatgaaaaatgtgccttgttaatacttgacaagatacaagacgagagcctta

SEQ ID NO: 1816 - DNA, 39 bp, Homo Sapiens
  misc_feature 11, 22: n = A,T,C or G
gctgcagtttncgttacgtatncggatccagaattcgtg

SEQ ID NO: 1817 - DNA, 44 bp, Homo Sapiens
tgatctgactggaaaaaaaaatttttttttttccagtcagatca

SEQ ID NO: 1818 - DNA, 53 bp, Homo Sapiens
  misc_feature 12, 15, 47, 49, 53: n = A,T,C or G
tttttttttttnccnaccctttttctttttttttttttttttttccnangggn

SEQ ID NO: 1819 - DNA, 35 bp, Homo Sapiens
  misc_feature 29, 33, 35: n = A,T,C or G
ttttttttttttttttcccacaaaacaancatncn

SEQ ID NO: 1820 - DNA, 158 bp, Homo Sapiens
  misc_feature 5, 53, 61, 79, 106, 119, 154: n = A,T,C or G
agttncgttacgtatcggatccagaattcgtgatttttttttttttccctgtncccttatnttcagctgtcactcgaanaataccattcacatctatctcaaaggngacttcaatctgngggaccccacgaggagcaggaggaattccagtcanatca

SEQ ID NO: 1821 - DNA, 35 bp, Homo Sapiens
  misc_feature 22: n = A,T,C or G
gcagttttcgttacgtatcggntccagaattcgtg

SEQ ID NO: 1822 - DNA, 132 bp, Homo Sapiens
  misc_feature 26, 123, 130, 132: n = A,T,C or G
tgatctgactggaaaaaaaaaaaaangaaaaaaaaaaaaaaaaaaaaaaaaaaaaaaaaaaaaaaaaaaaaaaaagggggggggaaaaaaaaaaaaaaaaaaaaaaaaaaaaaaaaaaaaaanaaaacanan

SEQ ID NO: 1823 - DNA, 67 bp, Homo Sapiens
  misc_feature 33: n = A,T,C or G
tcctttgtattcatgtgtgcacagaggcctganggagtcaatgaagcccacatcagcagtcagatca

SEQ ID NO: 1824 - DNA, 113 bp, Homo Sapiens
  misc_feature 28, 60, 66, 102, 109: n = A,T,C or G
ttttttttttttcctaaagttggagtanggattatggaataatctatataaagtatttancataangcttagtaaggggtaaacatccaacagacagcaaangttagcntagt

SEQ ID NO: 1825 - DNA, 107 bp, Homo Sapiens
  misc_feature 51, 83, 100, 104, 107: n = A,T,C or G
gatctgactggaaaaaaaaaaaaaaaaaaaaaaaaaaaaaaaaaaaaaaangggggggggggaaaaaaaaaaaaaaaaaaaanaaaaagggggggggggnaaanggn

SEQ ID NO: 1826 - DNA, 145 bp, Homo Sapiens
  misc_feature 124, 137, 140, 145: n = A,T,C or G
tagtcagatcaagacataatgataactcagtaacaacaactcatggttttatgcttatatttcacagataacacttctgttaactcctttttttttttttttttcccaatccggggagctctgntaaaggcctgaangtnattan

SEQ ID NO: 1827 - DNA, 211 bp, Homo Sapiens
  misc_feature 30, 32, 83, 157, 162, 185, 196, 207, 210: n = A,T,C or G
ttttttttttttccaccaatcccttgtctntntttggagagatcttcttatcagctagtcctttggcaaaagtaattgcaacnttcttctaggtattctattgtccgttcctctggaggttttagtcctggtcccaggggttccaccagttggtcanccagncccattttctttgccctgtctgnacgaatgcttncaccaagtcanatna

SEQ ID NO: 1828 - DNA, 268 bp, Homo Sapiens
  misc_feature 32, 83, 102, 104, 189, 197, 204, 207, 223, 227, 251, 262,263, 268: n = A,T,C or G
ttttttttttttccaccaatcccttgtctctntttggagagatcttcttatcagctagtcctttggcaaaagtaattgcaacnttcttctaggtattctatngncccgttcctctggaggttttagtcctggccccaggggttccaccagttggtcaaccagccccattttctttgccctgtctgcacnaatgcttntaccagncanatcaatttgaattcgncganaaagcttttcgagccctaggctanctttaaaccanncgggn

SEQ ID NO: 1829 - DNA, 49 bp, Homo Sapiens
tcccattttctttgccctgtctgcacgaatgcttctaccagtcagatca

SEQ ID NO: 1830 - DNA, 16 bp, Homo Sapiens
ttttccagtcagatca

SEQ ID NO: 1831 - DNA, 190 bp, Homo Sapiens
gactggtgatctgactggtgatctgactggtgatctgactggctttggcaaaagtaattgcaacttcttctaggtattctattgtccgttcctctggaggttttagtcctggtcccaggggttccaccagttggtcaaccagtcccattttctttgccctgtctgcacgaatgcttctaccagtcagatc

SEQ ID NO: 1832 - DNA, 57 bp, Homo Sapiens
tgatctgactgccactcctttctttcaaggacagtgttttttgtagtaaaatcacta

SEQ ID NO: 1833 - DNA, 153 bp, Homo Sapiens
ttcccactgtctgacttttcctcactgtcggacttctgttgctttttggtttcagacttctcatctttctttaagtctgcttttggtcctttgtattcatgtgtgtacagaggccagaaggagtcaatgaagcccacatcagcagtcagatca

SEQ ID NO: 1834 - DNA, 34 bp, Homo Sapiens
  misc_feature 21: n = A,T,C or G
gcagtttcgttgcgtatcggntccagaattcgtg

SEQ ID NO: 1835 - DNA, 34 bp, Homo Sapiens
  misc_feature 7: n = A,T,C or G
gcagttncgttacgtatcggatccagaattcgtg

SEQ ID NO: 1836 - DNA, 98 bp, Homo Sapiens
tgatctgactgggaaaaaaaaattttcttttttccatcaaccatttttccatgctgcttaagagcctatgcaagaacagcttaagaccagtcagatca

SEQ ID NO: 1837 - DNA, 113 bp, Homo Sapiens
ttttttttttcccaacaataaatatagaaaatagcctttaacaagcgtcttttagcttggtcagggttgtatcatttgtttggaaagtacatccttcccctgcagtcagatca

SEQ ID NO: 1838 - DNA, 122 bp, Homo Sapiens
  misc_feature 75, 114, 118: n = A,T,C or G
tgatctgactgcaggggaaggatgtactttcccaacaataaatatagaaaacagcctttaacaagcgtcttttancttggtcagggttgtatcatttgtttggaaagtacatcnccanacag

SEQ ID NO: 1839 - DNA, 141 bp, Homo Sapiens
  misc_feature 118, 120, 135, 139, 141: n = A,T,C or G
tgatctgactgcaggggaaggatgtactttccaaacaaatgatacaaccctgaccaagctaaaagacgctcgttaaaggctattttctatatttattgttgggaaaaaaaaaaaaaananaaaacctgccttttntggngn

SEQ ID NO: 1840 - DNA, 115 bp, Homo Sapiens
  misc_feature 60, 90, 111: n = A,T,C or G
ttttttttttttcccaacaataaatatagaaaatagcctttaacaagcgtcttttagctnggtcagggttgtatcatttgtttggaaagnacatccttcccctgcagtcanatca

SEQ ID NO: 1841 - DNA, 117 bp, Homo Sapiens
  misc_feature 110: n = A,T,C or G
gtttttttttttcctaccctttgccttaagattacctttctgaaaccagtatcagatctctaaaatagcctggtacttcctctaaaatccttcactagttcataggcagncagatca

SEQ ID NO: 1842 - DNA, 190 bp, Homo Sapiens
agggcgaattgggccctctagatgcatgctcgagcggccgccagtgtgatggatatctgcagaattcggcttgatccagtacagaatgtggccaagactcttaagactaatgttctctttggagaaagacaagtgagaaacttcagccaagtcatcctcttgccaaaaaaaaaaaaagccgaattccagc

SEQ ID NO: 1843 - DNA, 135 bp, Homo Sapiens
ttcgttacgtatcggaccagaattcgtgattgatctgactgcaggggaaggatgtactttccaaacaaatgatacaaccctgaccaagctaaaagacgcttgttaaaggctattttctatatttattgttgggaa

SEQ ID NO: 1844 - DNA, 159 bp, Homo Sapiens
  misc_feature 66, 70, 107: n = A,T,C or G
tgcagtatgcgttacgtatcggatccagaattcgtgatttttttttttttcccagtactgatcggngcgnggaattccagccaccacttctgattcgattccacagngatcctgtcctctgagtattttaaagaagccattgtcaccccagtcagatca

SEQ ID NO: 1845 - DNA, 115 bp, Homo Sapiens
  misc_feature 60, 63, 83, 111, 114: n = A,T,C or G
ttttttttttttcccaacaataaatatagaaaatagcctttaacaagcgtcttttagctnggncagggttgtatcatttgttnggaaagtacatccttcccctgcagtcanatna

SEQ ID NO: 1846 - DNA, 115 bp, Homo Sapiens
  misc_feature 60, 83, 114: n = A,T,C or G
ttttttttttttcccaacaataaatatagaaaatagcctttaacaagcgtcttttagctnggtcagggttgtatcatttgttnggaaagtacatccttcccctgcagtcagatna

SEQ ID NO: 1847 - DNA, 68 bp, Homo Sapiens
  misc_feature 64, 67, 68: n = A,T,C or G
accacacgtgtgggggcccgagctcgcggccgctgtattctatagtgtcacctaaatagcgccncgnn

SEQ ID NO: 1848 - DNA, 34 bp, Homo Sapiens
  misc_feature 7: n = A,T,C or G
cagtatncgttacgtatcggatccagaattcgtg

SEQ ID NO: 1849 - DNA, 180 bp, Homo Sapiens
  misc_feature 51, 135, 167, 173: n = A,T,C or G
tttttttttttcctattagaaaaatgaattgccttatatttggtcatttgnggggtatcccaaatagtcccactctctccatcactttctctgctgtaaactatcacattacctcaatgaaatatccttctaatnggtttccctgcttccaattacattttctattnggcagncagatca

SEQ ID NO: 1850 - DNA, 122 bp, Homo Sapiens
  misc_feature 28, 32, 49, 52, 77, 81, 103, 105, 118: n = A,T,C or G
ttttttttttttcccagtactgatcggngcgnggaattccagccaccanttntgattcgattccacagggatcctgncctntgagtattttaaagaagccatngncaccccaagtcanatca

SEQ ID NO: 1851 - DNA, 115 bp, Homo Sapiens
  misc_feature 60: n = A,T,C or G
ttttttttttttcccaacaataaatatagaaaatagcctttaacaagcgtcttttagctnggtcagggttgtatcatttgtttggaaagtacatccttcccctgcagtcagatca

SEQ ID NO: 1852 - DNA, 171 bp, Homo Sapiens
tttttttttaccaatgtatcctgtaactttcaaaacatatttagaatctgatcacttctcactgcctgtactaatattgtattagctcaagtgatggttatttcttacctagattattgttaacaacctatcaactggtctcccctgcctccactctttccgctatgatca

SEQ ID NO: 1853 - DNA, 66 bp, Homo Sapiens
  misc_feature 6, 9, 22, 60: n = A,T,C or G
ggtttnggntttgggggacccnaaaaaaaagggggattttttttttttttttttcccaanaaaaaa

SEQ ID NO: 1854 - DNA, 32 bp, Homo Sapiens
  misc_feature 16, 23, 27, 32: n = A,T,C or G
gggaaccggtttgggnttggggncccnaaatn

SEQ ID NO: 1855 - DNA, 22 bp, Homo Sapiens
  misc_feature 19, 20, 22: n = A,T,C or G
ggaaccgtgaaaatttttnngn

SEQ ID NO: 1856 - DNA, 94 bp, Homo Sapiens
  misc_feature 4, 7, 14, 25, 29, 40, 43, 51, 62, 86, 93, 94: n = A,T,C or G
gggnacngcgtttnttttttggggnccanaaaatttgggnatngaattttngtttataaggntttttttgggccctgggggttgtnttttaann

SEQ ID NO: 1857 - DNA, 24 bp, Homo Sapiens
  misc_feature 12, 17, 22, 24: n = A,T,C or G
ccccccgggccnccgcnttttntn

SEQ ID NO: 1858 - DNA, 82 bp, Homo Sapiens
  misc_feature 3, 20, 28, 38, 41, 63, 67, 76, 77, 82: n = A,T,C or G
ttnggttttggggttccccnaaattttnggggaaattntgngggggaaaaaaaaaaaaaattngtanttttttggnnaaggn

SEQ ID NO: 1859 - DNA, 20 bp, Homo Sapiens
  misc_feature 1, 8, 16, 19, 20: n = A,T,C or G
ncccccgnggaaaccnggnn

SEQ ID NO: 1860 - DNA, 17 bp, Homo Sapiens
  misc_feature 2, 12, 14, 17: n = A,T,C or G
anttggaatttngnggn

SEQ ID NO: 1861 - DNA, 16 bp, Homo Sapiens
  misc_feature 7, 8, 16: n = A,T,C or G
tttttannaggggggn

SEQ ID NO: 1862 - DNA, 43 bp, Homo Sapiens
  misc_feature 11, 17, 38, 42, 43: n = A,T,C or G
ggtttgggtcnaaattngggttggaatttggggaggcntttnn

SEQ ID NO: 1863 - DNA, 128 bp, Homo Sapiens
  misc_feature 5, 14, 23, 68, 87, 95, 101, 107, 121, 124, 128: n = A,T,C or G
ggccnggtttgggnttggggganccaaaaaaaagggggaattttttttttttttcggggggaaggggncaaccccccccccccgggnccgggggnaaaaancggganaagggggggaaaanggntttn

SEQ ID NO: 1864 - DNA, 36 bp, Homo Sapiens
  misc_feature 6, 15, 31: n = A,T,C or G
ccccanaaatttttnttgggggggggggggnggggg

SEQ ID NO: 1865 - DNA, 51 bp, Homo Sapiens
  misc_feature 5, 8, 23, 30, 46, 50, 51: n = A,T,C or G
tcggnatnggggacccaaaaaanagggganttttttttttttttcngggnn

SEQ ID NO: 1866 - DNA, 80 bp, Homo Sapiens
  misc_feature 3, 6, 13, 17, 30, 47, 51, 57, 75, 78, 80: n = A,T,C or G
cgnttngggtttngggnaccaaaaaatttngggatttggaattttgngganaagggnttttttggggccctgggnttngn

SEQ ID NO: 1867 - DNA, 41 bp, Homo Sapiens
  misc_feature 9, 15, 19, 29, 30: n = A,T,C or G
gggggaagnggtttnggtnttggggaccnnaaaaatagggg

SEQ ID NO: 1868 - DNA, 102 bp, Homo Sapiens
  misc_feature 6, 45, 64, 79, 88, 91, 99: n = A,T,C or G
ttttangggggggggggggttttttttttttttccaaaaaaaaanaggggggggggaaaaaaanggggggggggccccntttttaaangangggggggnggg

SEQ ID NO: 1869 - DNA, 23 bp, Homo Sapiens
  misc_feature 4, 6: n = A,T,C or G
tttngnaaaaaaaaaaaaaaagg

SEQ ID NO: 1870 - DNA, 55 bp, Homo Sapiens
  misc_feature 5, 9, 19, 24, 35, 47, 53, 55: n = A,T,C or G
ggggnccgnaaatgggganatttntaattgggggnaagggtttttgnggcctngn

SEQ ID NO: 1871 - DNA, 28 bp, Homo Sapiens
  misc_feature 6, 7, 25: n = A,T,C or G
ccgggnnggtttggggcccaaaaantgg

SEQ ID NO: 1872 - DNA, 44 bp, Homo Sapiens
  misc_feature 13, 17, 35, 39, 44: n = A,T,C or G
ccggttttttttngggncaaaaaaaaatgggttgnaatnttttn

SEQ ID NO: 1873 - DNA, 16 bp, Homo Sapiens
  misc_feature 8, 9, 16: n = A,T,C or G
ccccgttnnggttttn

SEQ ID NO: 1874 - DNA, 80 bp, Homo Sapiens
  misc_feature 2, 10, 21, 36, 42, 60, 66, 73, 76, 80: n = A,T,C or G
tnggggggancaaggccgccngggaccttccttttngggggngggccggggaaaaaaaancccccncctttcncgngggn

SEQ ID NO: 1875 - DNA, 46 bp, Homo Sapiens
  misc_feature 12, 14, 29, 37, 40, 46: n = A,T,C or G
acccggttgggntnggggaccccaaattnggggtccncanaaaaan

SEQ ID NO: 1876 - DNA, 30 bp, Homo Sapiens
  misc_feature 6, 17, 21, 28, 30: n = A,T,C or G
cttttntttttgggggnccanaaaaaanan

SEQ ID NO: 1877 - DNA, 27 bp, Homo Sapiens
  misc_feature 5, 18, 23, 27: n = A,T,C or G
ggganccggtttggtttnggggncccn

SEQ ID NO: 1878 - DNA, 116 bp, Homo Sapiens
  misc_feature 16, 17, 106: n = A,T,C or G
tggctgaaataaacanntctgtacatacatctgtataattggtgtgttttatttctacaggacaaacttcttagaggtaagtttcatactgtcattgttactatcngctatgatca

SEQ ID NO: 1879 - DNA, 240 bp, Homo Sapiens
  misc_feature 55: n = A,T,C or G
tagaagaggaattataacgctgcagtttataacttaacactttatacttcagaangtagccagtggtgataggaaaaaaagtcaactggtcatgctaaaattcttccagtcatgttccgctatgatcaaggctgaaataaacatctctgtacatacatctgtataattggtgtgttttatttctacaggacaaactccttagaagtaagtttcatactgtcattgttactatcgctatga

SEQ ID NO: 1880 - DNA, 117 bp, Homo Sapiens
tgatcatagcgaaagcctactgtaatatgcacccatctcatccacgtagtaaagtgaacttaaaaattcaatcaaatgaacaattaaataaacacctgtgtgtttaagacatgggta

SEQ ID NO: 1881 - DNA, 49 bp, Homo Sapiens
tgatcatagcgcactacagcctcgaactcctgggctcaagtgattttca

SEQ ID NO: 1882 - DNA, 52 bp, Homo Sapiens
  misc_feature 38, 44, 50, 52: n = A,T,C or G
ttttttttttttaccccctccccctttttttttttttntttacncaaaanan

SEQ ID NO: 1883 - DNA, 196 bp, Homo Sapiens
  misc_feature 45, 145, 157: n = A,T,C or G
ttttttttttttacgcaatacatattcatatgtgtgtggctaagngggtatacacacacaaaaacgcacacacaaatctctgaaataactaaagaaatgcatcagctgagctcctgtagtttcagctaccttgggaagttgaggngggaaaatcacnttgagctcaggagttcgaggctgtagtgcgctatgatca

SEQ ID NO: 1884 - DNA, 140 bp, Homo Sapiens
tgatcatagcggaaagagtggaggcaggggagaccagttgataggttgttaacaataatctaggtaagaaataaccatcacttgagctaatacaatattagtacaggcagtgagaagtgatcagattctaaatatgttta

SEQ ID NO: 1885 - DNA, 179 bp, Homo Sapiens
  misc_feature 132, 177: n = A,T,C or G
ttttttttttttacggggagcctaaggttttgcttaagcttgaggaatagaaaaacacacaaagaaacgaccttgcccaaatccattactgagacgcccccctcatttccggaagtcctttaaaatccgcanaatattaatgctgaagcaccctcccctttactcctgcgctatganca

SEQ ID NO: 1886 - DNA, 174 bp, Homo Sapiens
  misc_feature 10, 11: n = A,T,C or G
tttttttttnnaccaatgtatcctgtaactttcaaaacatattcagaatctgatcacttctcactgcctgtactaatattgtattagctcaagtgatggttatttcttacctagattattgttaacaacctatcaacgtggtctcccctacctccactctttccgctatgatca

SEQ ID NO: 1887 - DNA, 128 bp, Homo Sapiens
tttttttttttttacagaagatgatgctgatggccagatcttggaactgctctggcaaagagctcaatactgagggcttggaaattagcaacggctttgctgtgtgcattttgatatggatcacgcta

SEQ ID NO: 1888 - DNA, 141 bp, Homo Sapiens
  misc_feature 66: n = A,T,C or G
ttttttttttttaccagaagaggaattataacgctgcagtttataacttagcactttatacttcanaactagccagtggtgataggaaaaaaagtcaactggtcatgctaaaattcttccagtcatgttccgctatgatca

SEQ ID NO: 1889 - DNA, 320 bp, Homo Sapiens
  misc_feature 299, 316, 318, 320: n = A,T,C or G
ctctagatgcatgctcgagcggccgccagtgtgatggatatctgcagaattcggcttctgcttgatggcattgaaacgaatgggaattgtaagcgactatgagaaaatccgtacctttgccgtagcaatagtaggtgttggtggagtaggtagtgtgacctgctgaaatgctgacaagatgtggcattggtaagttgctactctttgattatgacaaggtggaactagccaatatgaatagacttttcttccaacctcatcaagcagaagccgaattccagcacctgggccggccgctnctactggctccgagctngncn

SEQ ID NO: 1890 - DNA, 347 bp, Homo Sapiens
  misc_feature 165, 291, 293, 343, 344: n = A,T,C or G
ctctagatgcatgctcgagcggccgccagtgtgatggatatctgcagaattcggcttgatggcattgaaacgaatgggaattgtaagcgactatgagaaaatccgtacctttgccgtagcaatagtaggtgttggtggagtaggtagtgtgactgctgaaatgcntgacaagatgtggcattggtaagttgctactctttgattatgacaaggtggaactagccaatatgaatagacttttcttccaacctcatcaagcagaagccgaattccagcacctgggccggccgntnctactggatccgagctcggcaccaagcttggcgtaatcatggtcatactnnttt

SEQ ID NO: 1891 - DNA, 350 bp, Homo Sapiens
  misc_feature 298, 346: n = A,T,C or G
atgcatgctcgagcggccgccagtgtgatggatatctgcagaattcggcttctgcttgatggcattgaaacgaatgggaattgtaagcgactatgagaaaatccgtacctttgccgtagcaatagtaggtgttggtggagtaggtagtgtgactgctgaaatgctgacaagatgtggcattggtaagttgctactctttgattatgacaaggtggaactagccaatatgaatagacttttcttccaacctcatcaagccagaagccgaattccagcacctggggcgggccgttactantggatccgagctcggtaccaagcttggcgtaatcatggtcatactggntttc

SEQ ID NO: 1892 - DNA, 348 bp, Homo Sapiens
  misc_feature 154, 342, 344: n = A,T,C or G
ctctagatgcatgctcgagcggccgccagtgtgatggatatctgcagaattcggcttgatggcattgaaacgaatgggaattgtaagcgactatgagaaaatccgtacctttgccgtagcaatagtaggtgttggtggagtaggtagtgtgacntgctgaaatgctgacaagatgtggcattggtaagttgctactctttgattatgacaaggtggatctagccaatatgaatagacttttcttccaacctcatcaagcagaagccgaattccagcacctggggcgggccgttactagtggatccgagctcggtaccaagcttggcgtaatcatggtcatantntttt

SEQ ID NO: 1893 - DNA, 369 bp, Homo Sapiens
  misc_feature 8, 317, 364: n = A,T,C or G
agggcganttgggccctctagatgcatgctcgagcggccgccagtgtgatggatatctgcagaattcggcttctgcttgatggcattgaaacgaatgggaattgtaagcgactatgagaaaatccgtacctttgccgtagcaatagtaggtgttggtggagtaggtagtgtgactgctgaaatgctgacaagatgtggcattggtaagttgctactctttgattatgacaaggtggaactagccaatatgaatagacttttcttccaacctcatcaagcagaagccgaattccagcacctggggcggccgttactantggatccgagctcggtaccaagcttggcgtaatcatggtcatactgntttcc

SEQ ID NO: 1894 - DNA, 368 bp, Homo Sapiens
  misc_feature 185, 311, 317, 363, 364: n = A,T,C or G
gggcgaattgggccctctagatgcatgctcgagcggccgccagtgtgatggatatctgcagaattcggcttctgcttgatggcattgaaacgaatgggaattgtaagcgactatgagaaaatccgtacctttgccgtagcaatagtaggtgttggtggagtaggtagtgtgactgctgaaatgcntgacaagatgtggcattggtaagttgctactctttgattatgacaaggtggaactagccaatatgaatagacttttcttccaacctcatcaagcagaagccgaattccagcacctggggcggccgntactantggatccgagctcggtaccaagcttggcgtaatcatggtcatactnnttcc

SEQ ID NO: 1895 - DNA, 371 bp, Homo Sapiens
  misc_feature 317, 333, 364: n = A,T,C or G
gggcgaattgggccctctagatgcatgctcgagcggccgccagtgtgatggatatctgcagaattcggcttctgcttgatggcattgaaacgaatgggaattgtaagcgactatgagaaaatccgtacctttgccgtagcaatagtaggtgttggtggagtaggtagtgtgactgctgaaatgctgacaagatgtggcattggtaagttgctactctttgattatgacaaggtggaactagccaatatgaatagacttttcttccaacctcatcaagccagaagccgaattccagcacctggggcggccgttactantggatccgagctcggnaccaagcttggcgtaatcatggtcatactgncttccct

SEQ ID NO: 1896 - DNA, 365 bp, Homo Sapiens
  misc_feature 175, 282, 357, 364, 365: n = A,T,C or G
agggcgaattgggccctctagatgcatgctcgagcggccgccagtgtgatggatatctgcagaattcggcttctgcttgatggcattgaaacgaatgggaattgtaagcgactatgagaaaatccgtacctttgccgtagcaatagtaggtgttggtggagtaggtagtgtgacntgctgaaatgcttgacaagatgtggcattggtaagttgctactctttgattatgacaaggtggaactagccaatatgaatagacttttcttccaacctcatcaagcngaattccagcacctggggcgggccgttactagtggatccgagctcggtaccaagcttggcgtaatcatggtcatntgttttnn

SEQ ID NO: 1897 - DNA, 324 bp, Homo Sapiens
  misc_feature 314: n = A,T,C or G
agggcgaattgggccctctagatgcatgctcgagcggccgccagtgtgatggatatctgcagaattcggcttctgcttgatggcattgaaacgaatgggaattgtaagcgactatgagaaaatccgtacctttgccgtagcaatagtaggtgttggtggagtaggtagtgtgactgctgaaatgctgacaagatgtggcattggtaagttgctactctttgattatgacaaggtggaactagccaatatgaatagacttttcttccaacctcatcaagccagaagccgaattccagcacctgggccggccgctnctactggctc

SEQ ID NO: 1898 - DNA, 127 bp, Homo Sapiens
  misc_feature 117: n = A,T,C or G
ttttttttttttaccattgggatgtcctgatccaacatcgaggtcgtaaaccctattgttgatatggactctagaataggattgccgctatgatcactgtcatttaacatcttgccngctatgatca

SEQ ID NO: 1899 - DNA, 88 bp, Homo Sapiens
  misc_feature 3, 7, 15, 20, 47, 79, 87, 88: n = A,T,C or G
ttngggnttggggancccgnaaattgggggatttttttttttttttncccccagggaaagaaccctttggggtttcccntttttccnn

SEQ ID NO: 1900 - DNA, 19 bp, Homo Sapiens
  misc_feature 14, 17, 19: n = A,T,C or G
gggggaacccccgnttngn

SEQ ID NO: 1901 - DNA, 19 bp, Homo Sapiens
  misc_feature 10, 14, 19: n = A,T,C or G
tttgggggancccnaaaan

SEQ ID NO: 1902 - DNA, 69 bp, Homo Sapiens
  misc_feature 1, 36, 43, 49, 53, 64: n = A,T,C or G
nggtttggtttttgggggcccaaaaatttggggggngggggcntttttngggngggggaaaccntttcc

SEQ ID NO: 1903 - DNA, 74 bp, Homo Sapiens
  misc_feature 13, 25, 46, 55, 57, 68, 69, 74: n = A,T,C or G
ggggggggggttnggttttgggggnccaaaaaaattgggggggggnttttagttngnggggaaaacannccccn

SEQ ID NO: 1904 - DNA, 58 bp, Homo Sapiens
gatcatagcggagacagtagataaaaacatggaacaggccagctaatgatgagtggta

SEQ ID NO: 1905 - DNA, 364 bp, Homo Sapiens
  misc_feature 20, 328, 343, 347, 360, 363, 364: n = A,T,C or G
ggcgaattgggccctctagntgcatgctcgagcggccgccagtgtgatggatatctgcagaattcggcttctgcttgatgaattaactagaaataactttgcaaggagagccaaagctaagacccccgaaaccagacgagctacctaagaacagctaaaagagcacacccgtctatgtagcaaaatagtgggaagatttataggtagaggcgacaaacctaccgagcctggtgatagccggttgtccaagatagaatcttagttcaactttaaatttgcccacagaaccctctgcactgtcaaaaaaaaaaaaagccgaattccagcncctgggcggccgttnctangggatccgagctnggnn

SEQ ID NO: 1906 - DNA, 384 bp, Homo Sapiens
ctctagatgcatgctcgagcggccgccagtgtgatggatatctgcagaattcggcttctgcttgatgtatgtccccttacacttggtattgaaactgtgggaggtgtcatgaccaaactgattccaaggaacacagtggtgcctaccaagaagtctcagatcttttctacagcttctgataatcaaccaaaatgttctatttaacaactgggtcatgtgcatctggtgtaggaagttttttctaccataagtgacaccaataaatgtttgttatttacactggtcaaactcagctcattttccacatcaagccgaattccagcacctggggcggccgttactagtggatccgagctcggtaccaagcttggcgtaatcatggtc

SEQ ID NO: 1907 - DNA, 346 bp, Homo Sapiens
ctctagatgcatgctcgagcggccgccagtgtgatggatatctgcagaattcggcttctgcttgatggcattgaaacgaatgggaattgtaagcgactatgagaaaatccgtacctttgccgtagcaatagtaggtgttggtggagtaggtagtgtgactgctgaaatgctgacaagatgtggcattggtaagttgctactctttgattatgacaaggtggaactagccaatatgaatagacttttcttccaacctcatcaagcagaagccgaattccagcacctggggcgggccgttactagtggatccgagctcggtaccaagcttggcgtaatcatggtcata

SEQ ID NO: 1908 - DNA, 419 bp, Homo Sapiens
  misc_feature 73, 298, 314, 330, 349, 360, 361, 377, 389, 390, 400, 403,413, 418, 419: n = A,T,C or G
gccctctagatgcatgctcgagcggccgccagtgtgatggatatctgcagaattcggcttctgcttgatggcnttgaaacgaatgggaattgtaagcgactatgagaacatccgtacctttgccgtagcaatagtaggtgttggtggagtaggtagtgtgactgctgaaatgctgacaagatgtggcattggtaagttgctacactttgattatgacaaggtggaactagccaatatgaatagacttttcttccaacctcatcaagccgaattccagcacactggcggccgttactantggatccgagctcggnaccaagcttggcgtantcatggccatagctgctcncctgatccccnncccctacactcttccncttcgtccctcnnccgctccccnccntcctcgtcgncgccnn

SEQ ID NO: 1909 - DNA, 515 bp, Homo Sapiens
  misc_feature 170, 510: n = A,T,C or G
ctctagcatgcatgctcgagcggccgccagtgtgatggatatctgcagaattcggcttctgcttgatggtattctttatgctttccaagaacagactacagaggactcagtaatgttgaacggctttggcacagtggttaatgctcttggcaaacgagtcaaaccatacnttgcctcagatctgtggtacagttttgtggcgtttaaataacaaatctgctaaagttaggcaacaggcagctgacttgatttctcgaactgctgttgtcatgatacggtctcgttctgtctcccaggctaaagtgcagtggcacaatcatagcttactgtagcctggaactcctgggctcaagtgattctcctacttcggcctcccaagtagctaggactacacatgcacgccaccacacctgactaattttaaaaatgttttgttgagatgggggtctcatgatgttgttcaggccggtcttgaactcctggcatcaagcagaagccgaattccagccntgggg

SEQ ID NO: 1910 - DNA, 389 bp, Homo Sapiens
  misc_feature 378: n = A,T,C or G
ctctagcatgcatgctcgagcggccgccagtgtgatggatatctgcagaattcggcttctgcttgatggtatgtactgagagtttagcatgtaggtcaaaggaacaagacctcattctctagttacatctccatacattatcctaaatcttacactgctttccattagctaaatggtcaactaaccatctgttaagcagatgcccctttaagggacagcataatacttaagtatctaaagcaactaactcaccttttgttagtaatttcaataattttaaaatatcatcatcaagcagaagccgaattccagcacctggggcggccgttactagtggatccgagctcggtaccaagcttggcgtaatcatggtcatantggttttccct

SEQ ID NO: 1911 - DNA, 365 bp, Homo Sapiens
  misc_feature 310, 312, 348, 356, 361, 365: n = A,T,C or G
ctctagatgcatgctcgagcggccgccagtgtgatggatatctgcagaattcggcttctgcttgatgtatgtccccttacacttggtattgaaactgtgggaggtgtcatgaccaaactgattccaaggaacacagtggtgcctaccaagaagtctcagatcttttctacagcttctgataatcaaccaaaatgttctatttaacaactgggtcatgtgcatctggtgtaggaagttttttctaccataagtgacaccaataaatgtttgttatttacactggtcaaaaaaaaaaaaagccgaattccancncctgggcggccgttactaggggatccgagctcggcnccaagctnggcgnaatn

SEQ ID NO: 1912 - DNA, 300 bp, Homo Sapiens
  misc_feature 166, 221, 252, 257, 263, 277: n = A,T,C or G
gatgcatgctcgagcggccgccagtgtgatggatatctgcagaattctgcttgatggtatgtactgagagtttagcatgtaggtcaaaggaacaagacctcattctctagttacatcgtccatacattatcctaaatcttacactgctttccattagctaaatggncaactaaccatctgttaagcagatgcccctttaagggacagcataatacttaagnatctaaagcaactaactcaccttttgttagnaattncaatanttttaaaatatcangatcaagcacgaagccgagttcc

SEQ ID NO: 1913 - DNA, 296 bp, Homo Sapiens
  misc_feature 288, 290, 296: n = A,T,C or G
ctctagatgcatgctcgagcggccgccagtgtgatggatatctgcagaattcggcttctgcttgatgatggttaaaatcggtttgatagcaccatgggacatttttctagcaaaaataaatgcatgaagagacatagccttttagttttgctaattgtgaaatggaaatgcctttacaggaagtaaatgcaaattacttttaagtgtgctttaaagaaaaatattttccccacaagagaaatttaaataaagaattttatttgtttatggtcaaaaaaaaaaaaaaanangggggn

SEQ ID NO: 1914 - DNA, 403 bp, Homo Sapiens
  misc_feature 346, 394, 402, 403: n = A,T,C or G
ggcgaattgggccctctagatgcatgctcgagcggccgccagtgtgatggatatctgcagaattcggcttctgcttgatggtatgtactgagagtttagcatgtaggtcaaaggaacaagacctcattctctagttacatctccatacattatcctaaatcttacactgctttccattagctaaatggtcaactaaccatctgttaagcagatgcccctttaagggacagcataatacttaagtatctaaagcaactaactcaccttttgttagtaatttcaataattttaaaatatcatcatcaagcagaagccgaattccagcacctggggcggccgctactantggatccgagctcggtaccaagcttggcgtaatcatggtcatagcggntttcctgnn

SEQ ID NO: 1915 - DNA, 55 bp, Homo Sapiens
  misc_feature 10, 50, 51, 55: n = A,T,C or G
gatcatagcngtggaaaaaaaaatttttttttccacgctatgatcaatcnngctn

SEQ ID NO: 1916 - DNA, 16 bp, Homo Sapiens
ttccacgctatgatca

SEQ ID NO: 1917 - DNA, 125 bp, Homo Sapiens
  misc_feature 95, 108, 120, 121, 125: n = A,T,C or G
tgatcatagcgtggaaaaaaaaaaaaaaaaaaaaaaaaaaaaaaagggggggggggaaaaaaaaaaaaaaaaaaaaaaaaaaaaaaaaaaaaaanggggggggggggnaaaaaaaaaaanntttn

SEQ ID NO: 1918 - DNA, 154 bp, Homo Sapiens
  misc_feature 104, 143: n = A,T,C or G
ttttttttttttaccaacacaaattgagccattttaataaaaaagctagtccaaaaaaggttctcattctataaagattaaatcatttccaaatcacagggaanggaacttgagtaattaaccaatttcgttttctactatgngccttaaatca

SEQ ID NO: 1919 - DNA, 140 bp, Homo Sapiens
gatctaaggcacatagtagaaaacaaaattggttaattactcaagttcctttcactgtgatttggaaatgatttgatctttatagaatgagaaccttttttggactagcttttttattaaaatggctcaatttgtgttga

SEQ ID NO: 1920 - DNA, 198 bp, Homo Sapiens
  misc_feature 39, 50, 60, 68, 85, 114, 119, 133, 162, 189, 193, 198: n = A,T,C or G
tttacccccctccccttttttttttttttttactcgaanaacaatttatngactttaaanaattttgnctaaggctacatatacncaattaaaaaacctttacactatttctanaaagncagcatgtattttnggctcgaagtttctttagggttttcttanggaattcttttgcccttgctctgtttngggnaaaan

SEQ ID NO: 1921 - DNA, 144 bp, Homo Sapiens
tgatctaaggccattggacacagaatccgagtgatgctgtacccctcaaggatttaaactaacgaaaaatcaataaataaatgtggatttgtgctcttgtatttttaagtggattaaaaaacttactaccgtaaaaaaaaaaac

SEQ ID NO: 1922 - DNA, 351 bp, Homo Sapiens
  misc_feature 307, 313: n = A,T,C or G
gcgaattgggccctctagagcatgctcgagcggccgccagtgtgatggatatctgcagaattcggcttctgcttgatggcattgaaacgaatgggaattgtaagcgactatgagaaaatccgtacctttgccgtagcaatagtaggtgttggtggagtaggtagtgtgactgctgaaatgctgacaagatgtggcattggtaagttgctactctttgattatgacaaggtggaactagccaatatgaatagacttttcttccaacctcatcaagcagaagccgaattccagcacctggggcggccgntactantggatccgagctcggtaccaagcttggcgtaatcatgg

SEQ ID NO: 1923 - DNA, 314 bp, Homo Sapiens
  misc_feature 163, 307, 309, 314: n = A,T,C or G
gccctctagatgcatgctcgagcggccgccagtgtgatggatatctgcagaattcggcttctgcttgatggcattgaaacgaatgggaattgtaagcgactatgagaaaatccgtacctttgccgtagcaatagtaggtgttggtggagtaggtagtgtgacntgctgaaatgctgacaagatgtggcattggtaagttgctactctttgattatgacaaggtggaactagccaatatgaatagacttttcttccaacctcatcaagccagaagccgaattccagcacactgggccggccgctcctncnggctn

SEQ ID NO: 1924 - DNA, 351 bp, Homo Sapiens
  misc_feature 303, 347, 350, 351: n = A,T,C or G
ctctagcatgcatgctcgagcggccgccagtgtgatggatatctgcagaattcggcttctgcttgatggcattgaaacgaatgggaattgtaagcgactatgagaaaatccgtacctttgccgtagcaatagtaggtgttggtggagtaggtagtgtgactgctgaaatgctgacaagatgtggcattggtaagttgctactctttgattatgacaaggtggaactagccaatatgaatagacttttcttccaacctcatcaagcagaagccgaattccagcacctgggccggccgttactantggatccgagctcggtaccaagcttggcgtaatcatggtcatantgnn

SEQ ID NO: 1925 - DNA, 355 bp, Homo Sapiens
  misc_feature 299: n = A,T,C or G
ctctagatgcatgctcgagcggccgccagtgtgatggatatctgcagaattcggcttctgcttgatggcattgaaacgaatgggaattgtaagcgactatgagaaaatccgtacctttgccgtagcaatagtaggtgttggtggagtaggtagtgtgactgctgaaatgcctgacaagatgtggcattggtaagttgctactcttcgattatgacagggtggaactagccaatatgaatagacttttcttccaacctcatcaagcagaagccgaattccagcacctgggccggccgctnctactggatccgagctcggtaccaagcttggcgtaatcatggtcatagctgttttt

SEQ ID NO: 1926 - DNA, 348 bp, Homo Sapiens
  misc_feature 340, 343, 348: n = A,T,C or G
ctctagatgcatgctcgagcggccgccagtgtgatggatatctgcagaattcggcttgatggcattgaaacgaatgggaattgtaagcgactatgagaaaatccgtacctttgccgtagcaatagtaggtgttggtggagtaggtagtgtgactgctgaaatgctgacaagatgtggcattggtaagttgctactctttgattatgacaaggtggaactagccaatatgaatagacttttcttccaacctcatcaagcagaagccgaattccagcacctggggcggccgttactagtggatccgagctcggtaccaagcttggcgtaatcatggtcatantgnttttn

SEQ ID NO: 1927 - DNA, 359 bp, Homo Sapiens
  misc_feature 301, 318, 329, 332, 340, 351: n = A,T,C or G
ctctagatgcatgctcgagcggccgccagtgtgatggatatctgcagaattcggcttctgcttgatggcattgaaacgaatgggaattgtaagcgactatgagaaaatccgtacctttgccgtagcaatagtaggtggtggtggagtaggtagtgtgactgctgaaatgcttgacaagatgtggcattggtaagttgctactctttgattatgacaaggtggaactagccaatatgaatagacttttcttccaacctcatcaagccagaagccgaattccagcacactgggcggccgcctncgtactggctccgagcntcgcccccaanctnggcgtaancatggtcatanctgttctc

SEQ ID NO: 1928 - DNA, 353 bp, Homo Sapiens
  misc_feature 319, 331: n = A,T,C or G
gcgaattgggccctctagatgcatgctcgagcggccgccagtgtgatggatatctgcagaattcggcttctgcttgatggcattgaaacgaatgggaattgtaagcgactatgagaaaatccgtacctttgccgtagcaatagtaggtgttggtggagtaggtagtgtgactgctgaaatgctgacaagatgtggcattggtaagttgctactctttgattatgacaaggtggaactagccaatatgaatagacttttcttccaacctcatcaagccagaagccgaattccagcacctgggccggccgctactactggntccgagctcggnaccaagcttggcgtaatcatgg

SEQ ID NO: 1929 - DNA, 362 bp, Homo Sapiens
  misc_feature 357, 359, 362: n = A,T,C or G
gccctctagatgcatgctcgagcggccgccagtgtgatggatatctgcagaattcggcttgatggcattgaaacgaatgggaattgtaagcgactatgagaaaatccgtacctttgccgtagcaatagtaggtgttggtggagtaggtagtgtgactgctgaaatgctgacaagatgtggcattggtaagttgctactctttgattatgacaaggtggaactagccaatatgaatagacttttcttccaacctcatcaagcagaagccgaattccagcacactgggcggccgttactagtggatccgagctcggtaccaagcttggcgtaatcatggtcatagctgtctttcctgancnccn

SEQ ID NO: 1930 - DNA, 352 bp, Homo Sapiens
  misc_feature 172, 304, 348, 351, 352: n = A,T,C or G
ctctagatgcatgctcgagcggccgccagtgtgatggatatctgcagaattcggcttctgcttgatggcattgaaacgaatgggaattgtaagcgactatgagaaaatccgtacctttgccgtagcaatagtaggtgttggtggagtaggtagtgtgacttgctgaaatgcntgacaagatgtggcattggtaagttgctactctttgattatgacaaggtggaactagccaatatgaatagacttttcttccaacctcatcaagcagaagccgaattccagcacctgggccggccgttactantggatccgagctcggtaccaagcttggcgtaatcatggtcatantgnn

SEQ ID NO: 1931 - DNA, 53 bp, Homo Sapiens
caccaaaatttatgaattgagggtactttttccaattgatggtgccttagatc

SEQ ID NO: 1932 - DNA, 114 bp, Homo Sapiens
ttctgcttgatgtcaatgagttggcaaggggaagggttgggagaaaggtatggcggccctctaggttcccccaaagcagggtttttcaacctcgacactactcaaaaaaaaaaa

SEQ ID NO: 1933 - DNA, 36 bp, Homo Sapiens
  misc_feature 19: n = A,T,C or G
tgctttttgcgttacgtancggatccagaattcgtg

SEQ ID NO: 1934 - DNA, 16 bp, Homo Sapiens
  misc_feature 10, 15, 16: n = A,T,C or G
gactgaaagnttttnn

SEQ ID NO: 1935 - DNA, 68 bp, Homo Sapiens
  misc_feature 30, 40, 46, 51, 61: n = A,T,C or G
tttttttttttttttttttttggggggggnggattaaacnaagggnaaagngggcccaaanaaaaaac

SEQ ID NO: 1936 - DNA, 79 bp, Homo Sapiens
ttggaggatttaactcagtgcatagttggcctcaatataagactccaagccaaaatccacactgttaatcatcaagcag

SEQ ID NO: 1937 - DNA, 76 bp, Homo Sapiens
ttggatttaactcagtgcatagttggcctcaatataagactccaagccaaaatccacactgttaatcatcaagcag

SEQ ID NO: 1938 - DNA, 79 bp, Homo Sapiens; identical to SEQ ID NO: 1936

SEQ ID NO: 1939 - DNA, 78 bp, Homo Sapiens
  misc_feature 73, 76, 78: n = A,T,C or G
ttctgcttgatgtggggaggggtgtttaaggggttggctagggtataattgtctgggtcaaaaaaaaaaaaanccnan

SEQ ID NO: 1940 - DNA, 121 bp, Homo Sapiens
  misc_feature 107, 116, 118, 121: n = A,T,C or G
ttctgcttgatgtgctgatgctgcttggtctgcttgatgtggggaggggtgtttaaggggttggctagggtataattgtctgggtcaaaaaaaaaaaaaaaaaaaanccctgctgntntgn

SEQ ID NO: 1941 - DNA, 98 bp, Homo Sapiens
  misc_feature 78, 87: n = A,T,C or G
ttctgcttgatgcggggaggggtgtttaaggggttggctagggtataattgtctgggtcaaaaaaaaaaaaaaaagtnttttaaaanttaaataaaat

SEQ ID NO: 1942 - DNA, 246 bp, Homo Sapiens
  misc_feature 178, 179, 202, 240, 242, 246: n = A,T,C or G
ttgttttcgcagctacaaaggaggctgaggcaggagaatcgcctgaacccatgaggttgaggtttcaatgagccaagatcactgccacgtgcactccagcctggacagagcgagaccctgtctcagcctcctttgtagctgcgaaaacaagccgaattctgcagatatccatcacacnnggcggccgctcgagcatgcatcnagagggcccaattcgccctatagtgagtcgtattacantncacn

SEQ ID NO: 1943 - DNA, 136 bp, Homo Sapiens
ttgttttcgcagctactagggaggctaaggcaggagaatggcgtgaacctgggaggcggaacttgcagtgagccgagatcacgccactgcactccagcctgggcaacagagcgagactccatctcaaaaaaaaaaa

SEQ ID NO: 1944 - DNA, 82 bp, Homo Sapiens
  misc_feature 19, 30, 34, 40, 67: n = A,T,C or G
tttttttttttttaaccanaaagatatccnccanggcaangaaagaaattacagaaatttctttaangaatatagagttcca

SEQ ID NO: 1945 - DNA, 42 bp, Homo Sapiens; identical to SEQ ID NO: 411
  misc_feature 25, 30, 35, 41, 42: n = A,T,C or G

SEQ ID NO: 1946 - DNA, 127 bp, Homo Sapiens
ttctgcttgatgtgatggcacatgcctataatcccagctacttgggaggctgaggcaggaggattgcttgaggccaggagtttgagaccagcctgggcaacatatcaagactgtctcttaaaaaaaa

SEQ ID NO: 1947 - DNA, 75 bp, Homo Sapiens
  misc_feature 15, 21, 56, 61, 66, 73, 75: n = A,T,C or G
tttttttttttttanccaaanggcagaaaaaattactatttcatcacaatttttanaaaanctacnggagggncn

SEQ ID NO: 1948 - DNA, 128 bp, Homo Sapiens
ttctgcttgatgctgattggttcagtagagatagcaaattaaaaaacaattgctttcagacactccagtagattttataaaaattgtgatgaaatagtaatttttacctgccttttggttaaaaaaaa

SEQ ID NO: 1949 - DNA, 113 bp, Homo Sapiens
ttctgcttgatgtgttctgactgtgtcttggctttgtgatgctgagtgccagaaatactctgtactataaaaactaccatcgttctttgaaacaacaaagaggaataaagaac

SEQ ID NO: 1950 - DNA, 91 bp, Homo Sapiens
ttctgcttgatggtggggtgggcatggaaatgggatcgacagaaatcagaggcagcagcgcaccttctgcatggcatgttaaaaaaaaaaa

SEQ ID NO: 1951 - DNA, 34 bp, Homo Sapiens
  misc_feature 19, 27, 30, 34: n = A,T,C or G
tttttttttttttaaccanaaagatanccnccan

SEQ ID NO: 1952 - DNA, 87 bp, Homo Sapiens
ttctgcttgatggtggggtgggcatggaaatgggatcgacagaaatcagaggcagcagcgcaccttctgcatggcatgttaaaaaaa

SEQ ID NO: 1953 - DNA, 144 bp, Homo Sapiens
ttctgcttgatggaactctatacagaaagatatccaccaaggcaatgaaagaaattacagaaatttctttaatgaatatagagttccatcaagcaggccaaagatgtctcccgcatgcgctcagtcctcatctccatcaagcag

SEQ ID NO: 1954 - DNA, 91 bp, Homo Sapiens; identical to SEQ ID NO: 1950

SEQ ID NO: 1955 - DNA, 91 bp, Homo Sapiens; identical to SEQ ID NO: 1950

SEQ ID NO: 1956 - DNA, 68 bp, Homo Sapiens
  misc_feature 38, 41: n = A,T,C or G
tttttttttttttaaggtttgcagaggggaagtttaanggnaccatcaccgggatagcccatcaagca

SEQ ID NO: 1957 - DNA, 38 bp, Homo Sapiens
ttagtttaatgggaccatcaccgtgatagcccatcaag

SEQ ID NO: 1958 - DNA, 60 bp, Homo Sapiens
ttctgcttgatgacattgtagactggttacaaatcaagataagttgtttaaaaaaaaaaa

SEQ ID NO: 1959 - DNA, 49 bp, Homo Sapiens
ttctgcttgatgtcaatcaaaacataccgttggctgttaaaaaaaaaaa

SEQ ID NO: 1960 - DNA, 60 bp, Homo Sapiens
ttctgcttgatgacattgtagactggttacaaatcaagataggttgtttaaaaaaaaaaa

SEQ ID NO: 1961 - DNA, 52 bp, Homo Sapiens
ttctgcttgatgcttgataggtcatccctccactgactgcccctgtaccaca

SEQ ID NO: 1962 - DNA, 211 bp, Homo Sapiens
ttctgcttgatggcattgaaacgaatgggaattgtaagcgactatgagaaaatccgtacctttgccgtagcaatagtaggtgttggtggagtaggtagtgtgactgctgaaatgctgacaagatgtggcattggtaagttgctactctttgattatgacaaggtggaactagccaatatgaatagacttttcttccaacctcatcaagcag

SEQ ID NO: 1963 - DNA, 207 bp, Homo Sapiens
ttctgcttgatggcattgaaacgaatgggaattgtaagcgactatgagaaaatccgtacctttgccgtagcaatagtaggtgttggtggagtaggtagtgtgactgctgaaatgctgacaagatgtggcattggtaagttgctactctttgattatgacaaggtggaactagccaatatgaatagacttttcttccaacctcatcaa

SEQ ID NO: 1964 - DNA, 211 bp, Homo Sapiens; identical to SEQ ID NO: 1962

SEQ ID NO: 1965 - DNA, 313 bp, Homo Sapiens
  misc_feature 245, 258, 269, 278, 285, 288, 308, 312, 313: n = A,T,C or G
ttctgcttgatggcattgaaacgaatgggaattgtaagcgactatgagaaaatccgtacctttgccgtagcaatagtaggtgttggtggagtaggtagtgtgactgctgaaatgctgacaagatgtggcattggtaagttgctactctttgattatgacaaggtggaactagccaatatgaatagacttttcttccaacctcatcaagcagaagccgaattccagcacactggcggccgctcgtnctggctccgagcncgccccccaancttggcgtnatcatgnccntagctgccttcctgcccccncccnn

SEQ ID NO: 1966 - DNA, 211 bp, Homo Sapiens; identical to SEQ ID NO: 1962

SEQ ID NO: 1967 - DNA, 211 bp, Homo Sapiens; identical to SEQ ID NO: 1962

SEQ ID NO: 1968 - DNA, 242 bp, Homo Sapiens
ttctgcttgatgatgatattttaaaattattgaaattactaacaaaaggtgagttagttgctttagatacttaagtattatgctgacccttaaaggggcatctgcttaacagatggttagttgaccatttagctaatggaaagcagtgtaagatttaggataatgtatggagatgtaactagagaatgaggtcttgttcctttgacctacatgctaaactctcagtacataccatcaagcag

SEQ ID NO: 1969 - DNA, 211 bp, Homo Sapiens; identical to SEQ ID NO: 1962

SEQ ID NO: 1970 - DNA, 211 bp, Homo Sapiens; identical to SEQ ID NO: 1962

SEQ ID NO: 1971 - DNA, 242 bp, Homo Sapiens
  misc_feature 149, 226: n = A,T,C or G
ttctgcttgatgatgatattttaaaattattgaaattactaacaaaaggtgagttagttgctttagatacttaagtattatgctgtcccttaaaggggcatctgcttaacagatggttagttgaccatttagctaatggaaagcagtgnaagatttaggataatgtatggagatgtaactagagaatgaggtcttgttcctttgacctacatgctaaactctcagnacataccatcaagcag

SEQ ID NO: 1972 - DNA, 211 bp, Homo Sapiens
ttctgcttgatggcattgaaacgaatgggaattgtaagcgactatgagaaaatccgtacctttgccgtagcaatagtaggtgttggtggagtaggtagtgtgactgctgaaatgctgacaagctatggcattggtaagttgctactctttgattatgacaaggtggaactagccaatatgaatagacttttcttccaacctcatcaagcag

SEQ ID NO: 1973 - DNA, 132 bp, Homo Sapiens
ttgatcaagtcccctgtattttcatcacagccatcacccctcccctttccacccgtgtctactgccttttcctctgcagtttgtttctgaactgactgaaatctctgtcagtctccgtgttaaaaaaaaaaa

SEQ ID NO: 1974 - DNA, 132 bp, Homo Sapiens; identical to SEQ ID NO: 1973

SEQ ID NO: 1975 - DNA, 183 bp, Homo Sapiens
  misc_feature 174, 181, 183: n = A,T,C or G
ttgatcaagtcccctgtattttcatcacagccatcacccctcccctttccacccgtgtctactgccttttcctctgcagtttgtttctgaactgactgaaatctctgtcagtctccgtgttaaaaaaaaaaaaaaaaaaaaaaaaaaaaaaaaaaaaaaaaggggggggggggnccccgantn

SEQ ID NO: 1976 - DNA, 126 bp, Homo Sapiens
ttgatcaagtcccctgtattttcatcacagccatcacccctcccctttccacccgtgtctactgccttttcctctgcagtttgtttctgaactgactgaaatctctgtcagtctccgtgttaaaaa

SEQ ID NO: 1977 - DNA, 47 bp, Homo Sapiens
  misc_feature 40, 46, 47: n = A,T,C or G
aattccagcacactggcggccgctcgtgcatgcttctagngggccnn

SEQ ID NO: 1978 - DNA, 40 bp, Homo Sapiens
ttgatcaagtcctgggctgttattcagtaggtagaaggca

SEQ ID NO: 1979 - DNA, 197 bp, Homo Sapiens
ttgatcatagccatcataaggtagcacaacacgataatcatgttgtttatggtgatgctggtataaacaaacctgtgctgccagtcatataaaaatctagcacataaaatgatgtaaggtatatagtacttaataaatggctaggttactggtaaaaaaaaaaaaaaaaaaaaaaaaaaaaaaggggggggggggtt

SEQ ID NO: 1980 - DNA, 165 bp, Homo Sapiens
ttgatcatagccatcataaggtagcacaacacgataatcatgttgtttatggtgatgctggtataaacaaacctgtgctgccagtcatataaaaatctagcacataaaatgatgtaaggtatatagtacttaataaatggctaggttactggttaaaaaaaaaaa

SEQ ID NO: 1981 - DNA, 192 bp, Homo Sapiens
  misc_feature 179: n = A,T,C or G
ttgatcatagccatcataaggtagcacaacacgataatcatgttgtttatggtgatgctggtataaacaaacctgtgctgccagtcatataaaaatctagcacataaaatgatgtaaggtatatagtacttaataaatggctaggttactggttaaaaaaaaaaaaaaaaaaaaaaaangggggggggggtt

SEQ ID NO: 1982 - DNA, 91 bp, Homo Sapiens
  misc_feature 30, 50, 62, 67, 72, 83, 85, 91: n = A,T,C or G
tttttttttttttaaccaaatctttgaaanccagggtatattttacattnacagaacatctnaattnacacnggccacatttnanggactn

SEQ ID NO: 1983 - DNA, 165 bp, Homo Sapiens; identical to SEQ ID NO: 1980

SEQ ID NO: 1984 - DNA, 165 bp, Homo Sapiens; identical to SEQ ID NO: 1980

SEQ ID NO: 1985 - DNA, 159 bp, Homo Sapiens
ttgatcatagcccttctagtgggtatggtgtctcattgtggttttgacttgcatttctaatgacttaagatgatgaatgtcttttcatgagcttattggccatttgtatgtcatctttgaagaaatgtctattcaaatcctttgcccattaaaaaaaaa

SEQ ID NO: 1986 - DNA, 127 bp, Homo Sapiens
ttgttttcgcagtgcaagaggaaagcagaaaaatctttaagtgatttagaatttgatgcaagtactttacatgagagtcagcctttctgtggaactttctagtgagaggtcacagcgtcaaaaaaaa

SEQ ID NO: 1987 - DNA, 119 bp, Homo Sapiens
  misc_feature 21, 54, 58, 65, 76, 82, 103, 110, 116, 119: n = A,T,C or G
tttttttttttttaacacggnactgacgtaggatgctaagtaagggacagatgnccanatctatnaaaggaaaggngggganggcaaatcaacaaacaagaangatcacncccacnttn

SEQ ID NO: 1988 - DNA, 180 bp, Homo Sapiens
ttgatcgcattgcacatcaacggatgggagattgaagatttctgttgaaacttacactgtttcatctcagcttttgatggtactgatgagtcttgatctagatacaggactggttccttccttagtttcaaagtgtctcattctcagagtaaaataggcaccattgcttaaaaaaaaaaa

SEQ ID NO: 1989 - DNA, 180 bp, Homo Sapiens; identical to SEQ ID NO: 1988

SEQ ID NO: 1990 - DNA, 25 bp, Homo Sapiens
ttgatcatagcgtcaaaaaaaaaaa

SEQ ID NO: 1991 - DNA, 104 bp, Homo Sapiens
  misc_feature 22: n = A,T,C or G
tagggcgatttgggccctctanctgcatgctcgagcggccgttactagtggatccgagctcggtaccaagcttggcgtaatcatggtcatagctgtttcctgca

SEQ ID NO: 1992 - DNA, 164 bp, Homo Sapiens
  misc_feature 19, 21, 101, 104, 158: n = A,T,C or G
ggcgatttgggccctctancntgcatgctcgagcggccgccagtgtgatggatatctgcagaattcggcttaattccagcacactggcggccgctcgtacnggntccgagctcggtaccaagcttggcgtaatcatggtcatagctgtttcctgcaanaaaaac

SEQ ID NO: 1993 - DNA, 119 bp, Homo Sapiens
  misc_feature 11, 24, 72, 79, 100, 117, 119: n = A,T,C or G
tatagggcganttgggccctctanatgcatgctcgagcggccgccagtgtgatggatatctgcagaattcgncttaaanccgaattccagcacactggcnggcatgctcgagcatgntn

SEQ ID NO: 1994 - DNA, 112 bp, Homo Sapiens
  misc_feature 101, 112: n = A,T,C or G
agggcgattgggccctctactgcatgctcgagcggccgccagtgtgatggatatctgcagaattaagccgaattccagcacactggcggccgctcgtgcangctccgagcgn

SEQ ID NO: 1995 - DNA, 158 bp, Homo Sapiens
  misc_feature 87, 93, 99, 108, 120, 133, 151, 155, 158: n = A,T,C or G
tttgggccctctacagcatgctcgagcggccgccagtgtgatggatatctgcagaattcggccgaattccagcacactggcggccgntagtanaggatncgagctcgncaccaagcttgncggtaatcatggncatagctgtttcctgcanccgnagn

SEQ ID NO: 1996 - DNA, 81 bp, Homo Sapiens
ctagcatgcatgctcgagcggccgccagtgtgatggatatctgcagaattaagccgaattccagcacactggcaggccgct

SEQ ID NO: 1997 - DNA, 89 bp, Homo Sapiens
  misc_feature 20: n = A,T,C or G
gcgaatttgggccctctagntgcatgctcgagcggccgccagtgtgatggatatctgcagaattcggcttaattccagcacactggcgg

SEQ ID NO: 1998 - DNA, 84 bp, Homo Sapiens
  misc_feature 33, 42, 44, 55, 56, 76, 82, 84: n = A,T,C or G
cgaattccagcacactggcggccgctcgtgcangcttctagngngcccccaacgnnctatagagcgtcgtcatacntgtctncn

SEQ ID NO: 1999 - DNA, 42 bp, Homo Sapiens
  misc_feature 27, 33, 37, 42: n = A,T,C or G
ttaattccagcacactggcggccgctngtacangctncgagn

SEQ ID NO: 2000 - DNA, 53 bp, Homo Sapiens
  misc_feature 27, 37, 44, 48, 53: n = A,T,C or G
ttaattccagcacactggcggccgctngtacaggctncgagcgngccnccaan

SEQ ID NO: 2001 - DNA, 31 bp, Homo Sapiens
  misc_feature 25, 28, 31: n = A,T,C or G
aattccagcacactggcggccgctngtncan

SEQ ID NO: 2002 - DNA, 44 bp, Homo Sapiens
  misc_feature 27, 37, 43, 44: n = A,T,C or G
ttaattccagcacactggcggccgctngtacaggctncgagcnn

SEQ ID NO: 2003 - DNA, 27 bp, Homo Sapiens
  misc_feature 12, 18: n = A,T,C or G
ctatgagtggcngaattnggggccctc

SEQ ID NO: 2004 - DNA, 145 bp, Homo Sapiens
  misc_feature 3, 82, 91, 97, 112, 131, 136, 144, 145: n = A,T,C or G
ganttgggccctctacatgcatgctcgagcggccgccagtgtgatggatatctgcagaattccagcacactggcggccgctngagcaggcntcgagngggccaccaaccttngagtaatcatggacatagntgttnccgtgcann

SEQ ID NO: 2005 - DNA, 112 bp, Homo Sapiens
  misc_feature 2, 14: n = A,T,C or G
cnctacagggcgantgggccctctacatgcatgctcgagcggccgccagtgtgatggatatctgcagaattccagcacactggcggccgctcgagcatgcatctagagggcc

SEQ ID NO: 2006 - DNA, 107 bp, Homo Sapiens
  misc_feature 98, 103, 107: n = A,T,C or G
ggcgaattgggccctctagcatgcatgctcgagcggccgccagtgtgatggatatctgcagaattccagcacactggcggccgctcgagcatgcttcnagagngccn

SEQ ID NO: 2007 - DNA, 110 bp, Homo Sapiens
  misc_feature 16, 94, 101, 108, 110: n = A,T,C or G
cgatttgggcgcctcnacatgcatgctcgagcggccgccagtgtgatggatatctgcagaattccagcacactggcggccgctcgagccggctncgagcgngcccccntn

SEQ ID NO: 2008 - DNA, 490 bp, Homo Sapiens
  misc_feature 460, 470, 474, 481, 488, 490: n = A,T,C or G
agggcgaattgggccctctagatgcatgctcgagcggccgccagtgtgatggatatctgcagaattcggcttgatcaagtcctgtatgggccagccaaatgtttgtagtttgagaatgttttgcaaatacctctctgcttccaagccattaatagctaatgaagttttattttggtttgtccattaatttttctgcttatttttactgtattgccatgtccttgatacgagacaagtagaactaaaagagagaaaatgagaggttaagactgtcagaagatgagaaatgtgagtcataaccataccttagtgttttaagggaactttatccagtccaatccctttatagaaaaggaacttttccaagttatgttgcagtatttatagtgtgtgaaattttgtttgactttggtagttgtgggacttgatcaagccgaattccagcacactgggcggccgntactactggntccnagctcgncaccaancn

SEQ ID NO: 2009 - DNA, 518 bp, Homo Sapiens
  misc_feature 467, 483, 513, 514, 518: n = A,T,C or G
gggcgaattgggccctctagcatgcatgctcgagcggccgccagtgtgatggatatctgcagaattcggcttgatcaagtcctgtatgggccagccaaatgtttgtagtttgagaatgttttgcaaatacctctctgcttccaagccattaatagctaatgaagttttattttggtttgtccattaatttttctgcttatttttactgtattgccatgtccttgatacgagacaagtagaactaaaagagagaaaatgagaggttaagactgtcagaagatgagaaatgtgagtcataaccataccttagtgttttaagggaactttatccagtccaatccctttatagaaaaggaacttttccaagttatgttgcagtatttatagtgtgtgaaattttgtttgactttggtagttgtgggacttgattcaagccgaattccagcacctgggccggccgctactantggatccgagctcggnaccaagcttggcgtaatcatggtcatactnntttn

SEQ ID NO: 2010 - DNA, 283 bp, Homo Sapiens
  misc_feature 210, 213, 231, 241, 244, 257, 262, 268: n = A,T,C or G
gccctctagatgcatgctcgagcggccgccagtgtgatggatatctgcagaattcggcttgatcaagtccataaaaaatagaagcatatgacaaaaagcataagtcccacaaactccctagcggtgtgtatgtgtgtgtgtgttattcatatgcttctattttttatggacttgatcaagccgaattctgcagatatccatcacacctgncgnccgctcgagcatgcatcnagagggcccnatncgccctatagcgngccgnattacncttcactggccgccg

SEQ ID NO: 2011 - DNA, 77 bp, Homo Sapiens
  misc_feature 71, 75, 77: n = A,T,C or G
ctctagcatgcatgctcgagcggccgccagtgtgatggatatctgcagaattaatttcagcacactggcgnccgntn

SEQ ID NO: 2012 - DNA, 100 bp, Homo Sapiens
  misc_feature 95, 96, 100: n = A,T,C or G
agggcgaattgggccctctagcatgcatgctcgagcggccgccagtgtgatggatatctgcagaattaattccagcacacgtggctggccgctcnngccn

SEQ ID NO: 2013 - DNA, 237 bp, Homo Sapiens
  misc_feature 221, 235: n = A,T,C or G
ctctagctgcatgctcgagcggccgccagtgtgatggatatctgcagaattcggcttgatcaagtccataaaaaatagaagcatatgacaaaaagcataagtcccacaaactccctagcggtgtgtatgtgtgtgtgtgttattcatgtcacactacatgcaaattaaaaaatgaaagtgtggtcaaaaaaaaaaaaaaaaaaaaaaaaaaaaaaaaaaangggggggggggggntt

SEQ ID NO: 2014 - DNA, 135 bp, Homo Sapiens
  misc_feature 115, 130: n = A,T,C or G
ctctagatgcatgctcgagcggccgccagtgtgatggatatctgcagaattcggcttgatcaagtccacagatggagggattgattatccttggtcaaaaaaaaaaaaagccganttccagcacactggnggccg

SEQ ID NO: 2015 - DNA, 207 bp, Homo Sapiens
gggcgaattgggccctctagatgcatgctcgagcggccgccagtgtgatggatatctgcagaattcggcttgatcaagtccacagatggagggattgattatccttggtcacatctgtggacttgatcaagccgaattctgcagatatccatcacactggcggccgctcgagcatgcatctagagggcccaattcgccctatagtga

SEQ ID NO: 2016 - DNA, 181 bp, Homo Sapiens
  misc_feature 130, 135, 152, 164, 173, 179, 181: n = A,T,C or G
gggcgaattgggccctctagcatgcatgctcgagcggccgccagtgtgatggatatctgcagaattcggcttgatcaagtccctacttggtaaaatcagcctcaaaaaaaaaaaaagccgaattccagcncactnggcgggccgttcctacnggctccgagctnggccccaancttggngn

SEQ ID NO: 2017 - DNA, 130 bp, Homo Sapiens
  misc_feature 65, 84, 88, 111, 124, 127, 130: n = A,T,C or G
tagatgcatgctcgagcggccgccagtgtgatggatatctgcagaattcggcttttttttttttnggaaaacaggcggggaaanattngccgagttcctttaacttttttnaacctttccttangancan

SEQ ID NO: 2018 - DNA, 195 bp, Homo Sapiens
  misc_feature 174, 179, 190, 194, 195: n = A,T,C or G
ttgggccctctagcatgcatgctcgagcggccgccagtgtgatggatatctgcagaattcggctttcgatacaggacagggatggggctatcatcttttcttgaatagggctaaagaagtattttaacaaaaatctattatgtacccaaaaaaaaaaaaagccgaattccagcncactnggcggccgttnctann

SEQ ID NO: 2019 - DNA, 185 bp, Homo Sapiens
  misc_feature 169, 172, 180, 184, 185: n = A,T,C or G
ctctagatgcatgctcgagcggccgccagtgtgatggatatctgcagaattcggcttcgatacaggtgaggtgtgggatcagatcagggagggccttacggatttctgagctggatcttttacccttttatttagccaaaaaaaaaaaaagccgaattccagcacactnggnggccgttnctann

SEQ ID NO: 2020 - DNA, 298 bp, Homo Sapiens
  misc_feature 247, 276, 290, 297: n = A,T,C or G
agggcgaattgggccctctagatgcatgctcgagcggccgccagtgtgatggatatctgcagaattcggctttcggtcatagctacttgggaggctgaggtcagaggatcacttgagcccaggaggtcaaggctacagtgagccatgatcacaccactgcagtccagcctgggctacagagcgataccctgtctgtcccaaaaaaaaaaaaagccgaattccagcacactgggcggccgttactagnggatccgagctcggtaccaagcttggcgnaatcatggtcatantgttttnc

SEQ ID NO: 2021 - DNA, 201 bp, Homo Sapiens
  misc_feature 23: n = A,T,C or G
atagggcgaattgggccctctanatgcatgctcgagcggccgccagtgtgatggatatctgcagaattcggctttcggtcatagctacttgggaggctgaggtcagggtatcgctctgtagcccaggctggactgcagtggtgtgatcatggcctcactgtagccttgacctcccgggctcaagtgatcctctgaccctca

SEQ ID NO: 2022 - DNA, 236 bp, Homo Sapiens
  misc_feature 4, 221, 235: n = A,T,C or G
tagnggcgaattgggccctctagcatgcatgctcgagcggccgccagtgtgatggatatctgcagaattcggctttcggtcataggtaaacaaggggggatccttgagtcttacctaactcaagggtgggaggattttttaaattatagctaataaggagccagcacagggcctcaagcaaaattcaacttgccaaaaaaaaaaaaagccgaattccagcncactgggcggccgnt

SEQ ID NO: 2023 - DNA, 241 bp, Homo Sapiens
tagtggcgaattgggccctctagctgcatgctcgagcggccgccagtgtgatggatatctgcagaattcggcttggtactaaggtgaagggagagtatgatgtaactgtaccaaagctggaaggagaactcaaaggcccaaaagtggacattgatgccccagatgtggatgttcatggcccagactggcacttgaagatgcccaaaaaaaaaaaaagccgaattccagcacactgggcggc

SEQ ID NO: 2024 - DNA, 264 bp, Homo Sapiens
  misc_feature 229, 245, 250, 261, 262, 264: n = A,T,C or G
atagggcgaattgggccctctagcatgcatgctcgagcggccgccagtgtgatggatatctgcagaattcggcttggtactaaggcatttagtgtcatggtaaagtgcatgtcacagcaggtagcatacaaaacatgatgaaattcaagattgtatgtgaaaacatactttctctttattacagaaacagtcacttgccaccaaaaaaaaaaaaagccgaattccagcncactgggcggccgttnctacnggatccgagcnngn

SEQ ID NO: 2025 - DNA, 88 bp, Homo Sapiens
  misc_feature 79, 82, 88: n = A,T,C or G
ctctagatgcatgctcgagcggccgccagtgtgatggatatctgcagaattaattccagcacactggcggccgctcgtncangcttcn

SEQ ID NO: 2026 - DNA, 201 bp, Homo Sapiens
  misc_feature 155, 173, 176, 184, 196, 198, 201: n = A,T,C or G
ctctagatgcatgctcgagcggccgccagtgtgatggatatctgcagaattcggcttgggactaaggacaagaaatattctacattgctgactgtgaacctaaagttcacatatggtaattacttagttctgaggccccaaattgagtagttttntgcccaaaaaaaaaaaanccnaattcccnccccctgggggncngtn

SEQ ID NO: 2027 - DNA, 223 bp, Homo Sapiens
  misc_feature 202, 218, 222, 223: n = A,T,C or G
ggcgaattgggccctctagatgcatgctcgagcggccgccagtgtgatggatatctgcagaattcggcttggtactaaggcgagaggatcacttgagcccaggaggtcaaggctacagtgagccatgttcatatcactgcacttccgtctgggagacaaagtgagaccctgtcccaaaaaaaaaaaaagccgaattccagcncacttggcggccgttnctann

SEQ ID NO: 2028 - DNA, 223 bp, Homo Sapiens
  misc_feature 8, 209: n = A,T,C or G
agggcganttgggccctctagcatgcatgctcgagcggccgccagtgtgatggatatctgcagaattcggcttggtactaaggagacagagtgcagggtgggggcaagactgggctgaaggggagctggactactttagtcttcctaaaggacaaaataaacagtattttatgccaaaaaaaaaaaaagccgaattccagcacactggnggccgttttttttg

SEQ ID NO: 2029 - DNA, 211 bp, Homo Sapiens
  misc_feature 201, 204: n = A,T,C or G
gggcgaattgggccctctagcatgcatgctcgagcggccgccagtgtgatggatatctgcagaattcggcttggtactaaggaggctgaggcaggaggatcacttgagctcaggagttcaaggctgctatggtcacaccactgcactccagctcaggcgacatagacctgtcccaaaaaaaaaaaaagccgaattccagcncantgggcgg

SEQ ID NO: 2030 - DNA, 222 bp, Homo Sapiens
  misc_feature 193, 198, 206, 211, 219, 221, 222: n = A,T,C or G
gccctctagatgcatgctcgagcggccgccagtgtgatggatatctgcagaattcggcttggtactaaggaggctgaggcaggaggatcacttgagctcaggagttcaaggctgctatggtcacaccactgcactccagctcaggcgacatagacctgtcccaaaaaaaaaaaaagccggaattccagcacantgggnggccgttnctacnggatccgngnn

SEQ ID NO: 2031 - DNA, 216 bp, Homo Sapiens
  misc_feature 20, 22, 209, 212, 216: n = A,T,C or G
gggcgaattgggccctctancngcatgctcgagcggccgccagtgtgatggatatctgcagaattcggcttaaactccgtcccaaaaacaacagcaacaacaacaaatagcaattagaggagcatttccttaaaattgtacaaaccccattaatgtgtggcttcatagaagacagcagggttctcctcgctgttcctgcatcagtctgnggnaaan

SEQ ID NO: 2032 - DNA, 107 bp, Homo Sapiens
  misc_feature 20, 89, 100, 102, 107: n = A,T,C or G
ggcgaattgggccctctagntgcatgctcgagcggccgccagtgtgatggatatctgcagaattaagccgaattccagcacactggcgnccgctcgtgcntncttcn

SEQ ID NO: 2033 - DNA, 132 bp, Homo Sapiens
  misc_feature 84, 93, 117, 124, 131, 132: n = A,T,C or G
tagggcgatttgggccctctagatgcatgctcgagcggccgccagtgtgatggatatctgcagaattcggcttttttttttttngcccccccncccttttttttttttttttttttnggggggnaaagggnn

SEQ ID NO: 2034 - DNA, 178 bp, Homo Sapiens
  misc_feature 162, 167, 176: n = A,T,C or G
ctctagcatgcatgctcgagcggccgccagtgtgatggatatctgcagaattcggcttggtactaaggcaattcaatagaaaaaggattttttttccttaacaaatgttgctgggacaattggatatccatgtgcaaaaaaaaaaaaagccgaattccagcncactnggcggccgntc

SEQ ID NO: 2035 - DNA, 165 bp, Homo Sapiens
  misc_feature 7, 165: n = A,T,C or G
gggcganttgggccctctagatgcatgctcgagcggccgccagtgtgatggatatctgcagaattcggcttggtactaaggcagtgaacaaagcagatagaaatccctgctcttggagagctgatattctaggtgtgggcaaaaaaaaaaaaagccgaattccan

SEQ ID NO: 2036 - DNA, 208 bp, Homo Sapiens
  misc_feature 155, 204: n = A,T,C or G
ctctagatgcatgctcgagcggccgccagtgtgatggatatctgcagaattcggcttggtactaaggcagcgaacaaagcagatagaaatccctgctcttggagagctgatattctaggtgtggaattccagcacacttggcggccgttacgtantggatccgagctcggtaccaagcttggcgtaatcatggtcatagctgtnttcc

SEQ ID NO: 2037 - DNA, 470 bp, Homo Sapiens
  misc_feature 23, 447, 455: n = A,T,C or G
tagggcgaattgggccctctagnatgcatgctcgagcggccgccagtgtgatggatatctgcagaattcggctttggtaaagggacagggtgggggaagtaattataaagtgggatcagaatatcaccaatgagggacagatggacatcatgtgcttcctgatgtgatactccgagaatgacatgatatcacctgtgttcttgtgagaccgcataaactcaatctagccacaaggaaacatcagacaacacaaaatgaggaatgttctattttttaaaaactaaaatttatttggattatgctgttaacttggtagttacagtctgccaattaattttaaagccttctgaggtaacagggatacttaaatcttacttgctctatttctgagttttaaaatgtagtaaaaagcataactgaacatggtcaaaaaaaaaaaaagccganttccagcncactgggcgggccgt

SEQ ID NO: 2038 - DNA, 456 bp, Homo Sapiens
  misc_feature 430, 438, 453, 454, 456: n = A,T,C or G
ctctagatgcatgctcgagcggccgccagtgtgatggatatctgcagaattcggctttggtaaagggacagggtgggggaagtaattataaagtgggatcagaatatcaccaatgagggacagatggacatcatgtgcttcctgatgtgatactccgagaatgacatgatatcacctgtgttcttgtgagaccgcataaactcaatctagccacaaggaaacatcagacaacacaaaatgaggaatgttctattttttaaaaactaaaatttatttggattatgctgttaacttggtagttacagtctgccaattaattttaaagccttctgaggtaacagggatacttaaatcttacttgctctatttctgagctttaaaatgtagtaaaaagcataactgaacatggtcaaaaaaaaaaaaagccganttccagcncctgggcggccgttnntn

SEQ ID NO: 2039 - DNA, 438 bp, Homo Sapiens
  misc_feature 430, 436, 438: n = A,T,C or G
ctctagatgcatgctcgagcggccgccagtgtgatggatatctgcagaattcggctttggtaaagggacagggtgggggaagtaattataaagtgggatcagaatatcaccaatgagggacagatggacatcatgtgcttcctgatgtgatactccgagaatgacatgataacacctgtgttcttgtgagaccgcataaactcaatctagccacaaggaaacatcagacaacacaaaatgaggaatgttctattttttaaaaactaaaatttatttggattatgctgttaacttggtagttacagtctgccaattaattttaaagccttctgaggtaacagggatacttaaatcttacttgctctatttctgagttttaaaatgtagtaaaaagcataactgaacatggtcaaaaaaaaaaaaagccganttccancn

SEQ ID NO: 2040 - DNA, 493 bp, Homo Sapiens
  misc_feature 444, 452, 467, 484, 488, 493: n = A,T,C or G
gggcgaattgggccctctagatgcatgctcgagcggccgccagtgtgatggatatctgcagaattcggctttggtaaagggacagggtgggggaagtaattataaagtgggatcagaatatcaccaatgagggacagatggacatcatgtgcttcctgatgtgatactccgagaatgacatgatatcacctgtgttcttgtgagaccgcataaactcaatctagccacaaggaaacatcagacaacacaaaatgaggaatgttctattttttaaaaactaaaatttatttggattatgctgttaacttggtagttacagtctgccaattaattttaaagccttctgaggtaacagggatacttaaatcttacttgctctatttctgagttttaaaatgtagtaaaaagcataactgaacatggtcaaaaaaaaaaaaagccganttccagcncctgggcggccgttnctaggggatccgagctnggcnccaan

SEQ ID NO: 2041 - DNA, 480 bp, Homo Sapiens
  misc_feature 454, 471, 475, 480: n = A,T,C or G
ctctagagcatgctcgagcggccgccagtgtgatggatatctgcagaattcggctttggtaaagggacagggtgggggaagtaattataaagtgggatcagaatatcaccaatgagggacagatggacatcatgtgcttcctgatgtgatactccgagaatgacatgatatcacctgtgttcttgtgagaccgcataaactcaatctagccacaaggaaacatcagacaacacaaaatgaggaatgttctattttttaaaaactaaaatttatttggattatgctgttaacttggtagttacagtctgccaattaattttaaagccttctgaggtaacagggatacttaaatcttacttgctctatttctgagttttaaaatgtagtaaaaagcataactgaacatggtcaaaaaaaaaaaaagccgaattccagcacctggggggggccgttnctaggggatccgagctnggcnccaan

SEQ ID NO: 2042 - DNA, 260 bp, Homo Sapiens
  misc_feature 225, 231, 246, 251, 256, 260: n = A,T,C or G
ctctagatgcatgctcgagcggccgccagtgtgatggatatctgcagaattcggctttggtaaaggggcggtgggagcgtcccgggagcgagggcgaaacgcggtgcagagggagctgtgggtgtgcacacaggtgccggtcatgtatgaatcagacttccctggacgaatgtacaggaaggatgagccctttgcatctctgggtcaaaaaaaaaaaaagccganttccancacactggcggccgntcctnctggntccn

SEQ ID NO: 2043 - DNA, 261 bp, Homo Sapiens
  misc_feature 225, 231, 254, 257, 261: n = A,T,C or G
ctctagatgcatgctcgagcggccgccagtgtgatggatatctgcagaattcggctttggtaaaggggcggtgggagcgtcccgggagcgagggcgaaacgcggtgcagagggagctgtgggtgtgcacacaggtgccggtcatgtatgaatcagacttccctggacgaatgtacaggaaggatgagccctttgcatctctgggtcaaaaaaaaaaaaagccganttccancacactgggcggccgttcctacnggntccn

SEQ ID NO: 2044 - DNA, 207 bp, Homo Sapiens
  misc_feature 69, 80, 112, 166, 200, 205, 207: n = A,T,C or G
ctctagatgcatgctcgagcggccgccagtgtgatggatatctgcagaattcggctttggtaaagggcntacaggactangaagcagataaggaaaatgattatgagggcgngatcatgaaaggtgataagcatcttctatgataggggaagtagctgtcttgtanacctacttgcgctgcatgtcaaaaaaaaaaaaanccgantn

SEQ ID NO: 2045 - DNA, 265 bp, Homo Sapiens
  misc_feature 216, 227, 236: n = A,T,C or G
agggcgaattgggccctctagatgcatgctcgagcggccgccagtgtgatggatatctgcagaattcggctttggtaaaggggctgggaggggggctgaacgtaaagccttagacacagcggagatttaagttgtggacttaaactctctgttcggcacggcatagagatctttgtcaaagcagatatccatcacactgggcggccgctcgtgcangcttcgagcgngcccccaancttggcgtaatcatggtcatagctgtttc

SEQ ID NO: 2046 - DNA, 242 bp, Homo Sapiens
  misc_feature 182, 184, 238: n = A,T,C or G
ctctagatgcatgctcgagcggccgccagtgtgatggatatctgcagaattcggctttggtaaaggggctgggaggggggctgaacgtaaagccttagacacagcggagatttaagttgtggacttaaactctctgtatggtaaaggggctgggagggaattccagcacacttggcggccgntnctactggatccgagctcggtaccaagcttggcgtaatcatggtcatagctgttntcct

SEQ ID NO: 2047 - DNA, 212 bp, Homo Sapiens
  misc_feature 193, 204, 207, 212: n = A,T,C or G
atagggcgaattgggccctctagatgcatgctcgagcggccgccagtgtgatggatatctgcagaattcggcttatctctatgccgtgccgaacagagagtttaagtccacaacttaaatctccgctgtgtctaaggctttacgttcagcccccctcccagcccctttaccaaagccgaattccagcacactnggcggccgctngtnctggn

SEQ ID NO: 2048 - DNA, 274 bp, Homo Sapiens
  misc_feature 201, 203, 222, 224, 235, 236, 251, 253, 267: n = A,T,C or G
gggcgaattgggccctctagatgcatgctcgagcggccgccagtgtgatggatatctgcagaattcggctttggtaaaggggctgggaggggggctgaacgtaaagccttagacacagcggagatttaagttgtggacttaaactctctgttcggcacggcatagagatctttgtcaaaaaaaaaaaaagccgaattccancncactgggcggccgttcctncnggctccgagcnngcccccaaccttggngnaatcatggtcatanctgttct

SEQ ID NO: 2049 - DNA, 184 bp, Homo Sapiens
  misc_feature 161, 172, 176, 182: n = A,T,C or G
atagggcgaattgggccctctagcatgcatgctcgagcggccgccagtgtgatggatatctgcagaattcggctttggtaaaggggagaggtagccccagaggtcagatttcctgctgtcaaatcacctttctctagggatcaaaaaaaaaaaaagccganttccagcacantggnggccgntc

SEQ ID NO: 2050 - DNA, 131 bp, Homo Sapiens
  misc_feature 77: n = A,T,C or G
catgcatgctcgagcggccgccagtgtgatggatatctgcagaattcggccgaattccagcacactggcggccgctnctactggatccgagctcggtaccaagcttggcgtaatcatggtcatagctgttt

SEQ ID NO: 2051 - DNA, 100 bp, Homo Sapiens
  misc_feature 91, 94, 100: n = A,T,C or G
ggcgaattgggccctctagcatgcatgctcgagcggccgccagtgtgatggatatctgcagaattcggctttttttttttttgccagccanatnaagccn

SEQ ID NO: 2052 - DNA, 76 bp, Homo Sapiens
  misc_feature 76: n = A,T,C or G
ctctagatgcatgctcgagcggccgccagtgtgatggatatctgcagaattaattccagcacactggcggccgctn

SEQ ID NO: 2053 - DNA, 193 bp, Homo Sapiens
  misc_feature 151, 159, 162, 176, 179, 188, 191, 193: n = A,T,C or G
ggcgaattgggccctctagctgcatgctcgagcggccgccagtgtgatggatatctgcagaattcggcttgatcatagccaccatcaccctccttaacctctacttctacctacgtcaaaaaaaaaaaaagccgaattccagcacactggnggccgttngtnggggatccgagctnggnaccaagctnggngn

SEQ ID NO: 2054 - DNA, 111 bp, Homo Sapiens
  misc_feature 86, 93, 102, 105, 111: n = A,T,C or G
gcgaattgggccctctagagcatgctcgagcggccgccagtgtgatggatatctgcagaattcggctttttttttttttgaccaanccggggntgaaaggangtnaacctn

SEQ ID NO: 2055 - DNA, 211 bp, Homo Sapiens
  misc_feature 161, 176, 190, 199: n = A,T,C or G
ctctagctgcatgctcgagcggccgccagtgtgatggatatctgcagaattcggcttgatcatagcccaatgaattactgtaaggttaacatccttacaaccacggtttggtcaaaaaaaaaaaaagccgaattccagcacactggcggccgttccgtagnggatccgagctcggnaccaagcttggcgnaatcatggncatagctgtttc

SEQ ID NO: 2056 - DNA, 154 bp, Homo Sapiens
  misc_feature 132: n = A,T,C or G
ctctagctgcatgctcgagcggccgccagtgtgatggatatctgcagaattcggcttgatcatagcccaatgaattactgtaaggttaacatccttacaaccacggtttggtcaaaaaaaaaaaaagccganttccagcacactggcgggccgt

SEQ ID NO: 2057 - DNA, 192 bp, Homo Sapiens
  misc_feature 150, 158, 161, 175, 178, 187, 190, 192: n = A,T,C or G
gcgaattgggccctctagctgcatgctcgagcggccgccagtgtgatggatatctgcagaattcggcttgatcatagccaccatcaccctccttaacctctacttctacctacgtcaaaaaaaaaaaaagccgaattccagcacactggnggccgttngtnggggatccgagctnggnaccaagctnggngn

SEQ ID NO: 2058 - DNA, 191 bp, Homo Sapiens
  misc_feature 91, 97, 122, 182, 183, 191: n = A,T,C or G
gcgaattgggccctctagagcatgctcgagcggccgccagtgtgatggatatctgcagaattttttttttttttgaccaaaccggggctgnaaggangttaaccttacagaaattcattggnctatgatcaagccgaattccagcacactggcgggccgttactaggggatccgagctcggnnccaagctn

SEQ ID NO: 2059 - DNA, 70 bp, Homo Sapiens
  misc_feature 64, 68, 70: n = A,T,C or G
gcgaattgggccctctagagcatgctcgagcggccgccagtgtgatggatatctgcagaattcnagtntn

SEQ ID NO: 2060 - DNA, 193 bp, Homo Sapiens
  misc_feature 146, 167, 175, 189, 192, 193: n = A,T,C or G
ggcgaattgggccctctagctgcatgctcgagcggccgccagtgtgatggatatctgcagaattcggcttgatcatagccaccatcaccctccttaacctctacttctacctacgcctaatctactccacctcaaaaaaaaaaaangccgaattccagcacactggnggccgttncgtaggggatccgngcnn

SEQ ID NO: 2061 - DNA, 400 bp, Homo Sapiens
  misc_feature 337, 379: n = A,T,C or G
aattgggccctctagctgcatgctcgagcggccgccagtgtgatggatatctgcagaattcggcttgatcatagccgtggatattttgagtgcattgaagagaacaagtatagcagagccaaatctcctcagccacctgttgaagaagaagatgaacaccttcgatgacacagtggtttgtcttgatacttataattgtgatctacattttaaaatatcaagagatcgtctcagtgcttcttcccttacaatggagagttttgcttttctttgggctggaggaagagcatcctatggtgtgtcaaaaaaaaaaaaagccgaattccagcacactggnggccgttactaggggatccgagctcggtaccaagcttggcgnaatcatggccatagctgtttc

SEQ ID NO: 2062 - DNA, 375 bp, Homo Sapiens
  misc_feature 177, 330, 338, 353, 366, 367, 375: n = A,T,C or G
aattgggccctctagctgcatgctcgagcggccgccagtgtgatggatatctgcagaattcggcttgatcatagccgtggatattttgagtacattgaagagaacaagtatagcagagccaaatctcctcagccacctgttgaagaagaagatgaacaccttcgatgacacagtggnttgtcttgatacttataattgtgatctacattttaaaatatcaagagatcgtctcagtgcttcttcccttacaatggagagttttgcttttctttgggctggaggaagagcatcctatggtgtgtcaaaaaaaaaaaaagccgaattccagcncactgggnggccgttactagggnatccgagctcggnnccaagctn

SEQ ID NO: 2063 - DNA, 188 bp, Homo Sapiens
  misc_feature 4, 12, 40, 62, 103, 135, 143, 153, 162, 179, 185, 188: n = A,T,C or G
tgtngaattggnccctctagcatgcatgctcgagcggccntcagtgtgatggatatctgcanaattcggctatttttttttttgaccatatggatcagagccntcaacgatgtataactttctcattcagagcanatactccngcattacaanggttagatnaagccgaattccagcanactggnggn

SEQ ID NO: 2064 - DNA, 170 bp, Homo Sapiens
  misc_feature 147: n = A,T,C or G
agggcgaattgggccctctagctgcatgctcgagcggccgccagtgtgatggatatctgcagaattcggcttgatcatagcccaatgaattactgtaaggttaacatccttacaaccacggtttggtcaaaaaaaaaaaaagccganttccagcacactggcggccgttc

SEQ ID NO: 2065 - DNA, 464 bp, Homo Sapiens
  misc_feature 406, 455, 461, 464: n = A,T,C or G
aattgggccctctagctgcatgctcgagcggccgccagtgtgatggatatctgcagaattcggcttgatcatagccaaatctgggacaagcgagtttttaaacaaaatgactgaagcacaggaagatggccagtcaacttctgaattgattggccagtttggtgtcggtttctattccgccttccttgtagcagataaggttattgtcacttcaaaacacaacaacgatacccagcacatctgggagtctgactccaatgaattttctgtaattgctgacccaagaggaaacactctaggacggggaacgacaattacccttgtcttaaaagaagaagcatctgattaccttgaattggatacaattaaaaatctcgtcaaaaaaaaaaaaagccgaattccagcncactggcggccgttactaggggatccgagctcggtaccaagcttggcgnaatcanggn

SEQ ID NO: 2066 - DNA, 130 bp, Homo Sapiens
  misc_feature 123, 127, 130: n = A,T,C or G
gcgaattgggccctctagatgcatgctcgagcggccgccagtgtgatggatatctgcagaattcggcttgatcatagcctcaaaaaaaaaaaaagccgaattccagcacacttggcgggccgntcgngcn

SEQ ID NO: 2067 - DNA, 320 bp, Homo Sapiens
  misc_feature 269: n = A,T,C or G
aattgggccctctagctgcatgctcgagcggccgccagtgtgatggatatctgcagaattcggcttggaggataatgccgatgtttcaggtttctgagtagagaaatgatccgtaatataggcctcgcccgatgtgtaggaagaggcagataaagaatattgaggcgccattggcgtgaaggtagcggatgattcagccataatttacgtctcgagtgatgtgggcgattgatcaagccgaattccagcacactggcggccgttactantggatccgagctcggtaccaagcttggcgtaatcatggtcatagctgtttc

SEQ ID NO: 2068 - DNA, 322 bp, Homo Sapiens
  misc_feature 279, 315, 319, 322: n = A,T,C or G
tagggcgaattgggccctctagctgcatgctcgagcggccgccagtgtgatggatatctgcagaattcggcttgatcaatcgcctcatagaggaaaataagatggatctgttaggaatggtggttgtggatgaattacatatgctgggagactctcaccgagggtatctgctggaacttttgctgaccaagatttgctatattactcggaaatcagcatcttgtcaggcagatctagccagttctctgtctaatgctgtcaaaaaaaaaaaaagccganttccagcacactggcggccgttactaggggatccgngctnggn

SEQ ID NO: 2069 - DNA, 175 bp, Homo Sapiens
  misc_feature 133, 170, 173, 175: n = A,T,C or G
ctctagctgcatgctcgagcggccgccagtgtgatggatatctgcagaattcggcttgatcaatcgcagaaatgttctatgtgtgtgtgtgtgtgtgtgtgtgtgtgtgtgtgttggagagagtctagcctgncccacagagtgagattccatgtcaaaaaaaaaaaaanccnan

SEQ ID NO: 2070 - DNA, 350 bp, Homo Sapiens
  misc_feature 272, 280, 315, 316, 326, 329, 349: n = A,T,C or G
aattgggccctctagctgcatgctcgagcggccgccagtgtgatggatatctgcagaattcggcttgatcaatcgcctcatagaggaaaataagatggatctgttaggaatggtggttgtggatgaattacatatgctgggagactctcaccgagggtatctgctggaacttttgctgaccaagatttgctatattactcggaaatcagcatcttgtcaggcagatctagccagttctctgtctaatgctgtcaaaaaaaaaaaaagccganttccagcncactggcggccgttactaggggatccgagctcggnnccaagcttgncgnaatcatggccatagctgttnc

SEQ ID NO: 2071 - DNA, 265 bp, Homo Sapiens
  misc_feature 181, 204, 209, 225, 231, 238, 253, 263, 264, 265: n = A,T,C or G
gcgaattgggccctctagctgcatgctcgagcggccgccagtgtgatggatatctgcagaattcggcttgatcaatcgctggaacctaggaggcagaggttgcagtaagctgagattgtgccactgcactccagcctgggagacagagtgagactccctctcaaaaaaaaaaaaagccganttccagcacactggcggccgttnctagnggatccgagctcggtnccaagnttggcgnaatcatggccatagntgtttcctgnnn

SEQ ID NO: 2072 - DNA, 330 bp, Homo Sapiens
  misc_feature 273, 288, 301, 302, 315, 321, 327, 330: n = A,T,C or G
aattgggccctctagctgcatgctcgagcggccgccagtgtgatggatatctgcagaattcggcttgatcaatcgcccacatcactcgagacgtaaattatggctgaatcatccgctaccttcacgccaatggcgcctcaatattctttatccgcctcttcctacacatcgggcgaggcctatattacggatcatttctctactcagaaacctgaaacatcggcattatcctcctgctcaaaaaaaaaaaaagccgaattccagcacactggnggccgttactagggnatccgagctcggnnccaagcttggggnaatcanggccanagn

SEQ ID NO: 2073 - DNA, 86 bp, Homo Sapiens
  misc_feature 80, 82, 86: n = A,T,C or G
gcgaattgggccctctagatgcatgctcgagcggccgccagtgtgatggatatctgcagaattcggcttttttttttttngnggan

SEQ ID NO: 2074 - DNA, 141 bp, Homo Sapiens
  misc_feature 119, 127: n = A,T,C or G
ggcgaattgggccctctagctgcatgctcgagcggccgccagtgtgatggatatctgcagaattcggcttgatcaatcgcatagagaagagggaggtgtcaaaaaaaaaaaaagccganttccagcncactggcggccgtt

SEQ ID NO: 2075 - DNA, 411 bp, Homo Sapiens
  misc_feature 366, 391, 395, 403, 406, 411: n = A,T,C or G
aattgggccctctagctgcatgctcgagcggccgccagtgtgatggatatctgcagaattcggcttgatcaatcgcccacatcactcgagacgtaaattatggctgaatcatccgctaccttcacgccaatggcgcctcaatattctttatctgcctcttcctacacatcgggcgaggcctatattacggatcatttctctactcagaaacctgaaacatcggcattatcctcctgcttgcaactatagcaacagccttcataggctatgtcctcccgtgaggccaaatatcattctgaggggccacagtaattacaaacttactatccgtcaaaaaaaaaaaaagccgaattccagcacactggnggccgttactaggggatccgagctnggtnccaagctnggngaaan

SEQ ID NO: 2076 - DNA, 109 bp, Homo Sapiens
  misc_feature 90, 104, 107, 109: n = A,T,C or G
gcgaattgggccctctagatgcatgctcgagcggccgccagtgtgatggatatctgcagaattcggctttttttttttttgaccagtttnaaaaagcaggatcnggnan

SEQ ID NO: 2077 - DNA, 320 bp, Homo Sapiens
  misc_feature 178, 233, 235, 252, 255, 265, 278, 284, 299, 315, 319, 320: n = A,T,C or G
ctctagctgcatgctcgagcggccgccagtgtgatggatatctgcagaattcggcttgatcaatcgcttgaaccggggaagcaggctatggtgtgccgagatcacgccattgcactccagcctgggcaacaagagcgaaactccgtctcaaaaaaaaaaaagaaggggaataatttgnggatgaggattggatataaggtaaaggatgggacattcttggacttacagatggngngattgcatggctagaanaanaattcccggncaaaaaaaaaaangccganttccagcacactggnggccgttattaggggntccnn

SEQ ID NO: 2078 - DNA, 307 bp, Homo Sapiens
  misc_feature 21, 255, 270, 271, 293, 299: n = A,T,C or G
gggcgaattgggccctctagntgcatgctcgagcggccgccagtgtgatggatatctgcagaattcggcttgatcaatcgcccacatcactcgagacgtaaattatggctgaatcatccgctaccttcacgccaatggcgcctcaatattctttatctgcctcttcccactgcactccagcctgagcgacagagtgagactccatctcaaaaaaaaaaaaagccgaattccagcacactggcggccgttactagnggatccgagctcggnnccaagcttggcgaaatcatggncatagntgtttcct

SEQ ID NO: 2079 - DNA, 190 bp, Homo Sapiens
  misc_feature 7, 172, 182, 184, 190: n = A,T,C or G
gggcganttgggccctctagcagcatgctcgagcggacgccagtgtgatggatatctgcagaattcggcttgatcaatcgcctgagtccagaagattgaggctacaataagctatgctgcacctgcaggctaggtgacattgcgagactctgcctcaaaaaaaaaaaaagcngaattccagnanattggn

SEQ ID NO: 2080 - DNA, 227 bp, Homo Sapiens
  misc_feature 207, 212, 219, 225, 227: n = A,T,C or G
ggcgaattgggccctctagctgcatgctcgagcggccgccagtgtgatggatatctgcagaattcggcttgatcaatcgctggaacctaggaggcagaggttgcagtaagctgagattgtgccacctgcactccagcctgggagacagagtgagactccctctcaaaaaaaaaaaaagcccgaattccagcacactggcggccgttnctagnggatccngagctngn

SEQ ID NO: 2081 - DNA, 223 bp, Homo Sapiens
  misc_feature 193, 199, 207, 217, 218, 223: n = A,T,C or G
tagggcgaattgggccctctagctgcatgctcgagcggccgccagtgtgatggatatctgcagaattcggcttgatcaatcgcttgaaccggggaagcaggctatggtgtgccgagatcacgccattgcactccagcctgggcaacaagagcgaaactccgtctcaaaaaaaaaaaaagccgaattccagcanactggnggccgttnctaggggatnntagcn

SEQ ID NO: 2082 - DNA, 218 bp, Homo Sapiens
  misc_feature 210: n = A,T,C or G
gggcgaattgggccctctagctgcatgctcgagcggccgccagtgtgatggatatctgcagaattcggcttgatcaatcgcttgaacccaggaggtggaagttgcagtgagccaagatcacgccactgcactccagcccggaggacagtgccgagactccctctcaaaaaaaaaaaaagccgaattccagcacactggcggccggtagtnggggatcc

SEQ ID NO: 2083 - DNA, 92 bp, Homo Sapiens
  misc_feature 85, 87, 92: n = A,T,C or G
ggcgaattgggccctctagcatgcatgctcgagcggccgccagtgtgatggatatctgcagaattcggctttttttttttttgananggagn

SEQ ID NO: 2084 - DNA, 259 bp, Homo Sapiens
  misc_feature 202, 210, 214, 223, 226, 250, 255: n = A,T,C or G
tatagggcgaattgggccctctagctgcatgctcgagcggccgccagtgtgatggatatctgcagaattcggcttgatcaatcgcttgaaaccgggaggatgaggttgcagtgagccaggattgcgccactgcactccagcctgggtgacagagcgagactctatctcaaaaaaaaaaaaagccgaattccagcacactggnggccgttnctangggatccgngcnggggaccaagtttggcggaaacanggcanagct

SEQ ID NO: 2085 - DNA, 265 bp, Homo Sapiens
  misc_feature 204, 209, 238, 247, 263, 264, 265: n = A,T,C or G
gcgaattgggccctctagctgcatgctcgagcggccgccagtgtgatggatatctgcagaattcggcttgatcaatcgcttgagcccaggacatggaggttgcagtgagctgagatcacaccattgcacttcagcctgggtgacagagtgagactccatctcaaaaaaaaaaaaagccgaattccagcacactggcggccgttnctagnggatccgagctcggtaccaagcttggcgnaatcatggncatagctgtttcctgnnn

SEQ ID NO: 2086 - DNA, 269 bp, Homo Sapiens
  misc_feature 184, 211, 230, 242, 244, 253: n = A,T,C or G
atagggcgaattgggccctctagctgcatgctcgagcggccgccagtgtgatggatatctgcagaattcggcttgatcaatcgcttgaacccaggaagtggaggttgcagtgagccgagattatgccacctgtactccagcctggcaagagagtgtgactctgcctcaaaaaaaaaaaaagccngaattccagcacactggcggccgttantaggggatccgagctgggnaccaagcttggngnaatcatggncataacctgtttcctg

SEQ ID NO: 2087 - DNA, 201 bp, Homo Sapiens
  misc_feature 172, 180, 193, 196, 201: n = A,T,C or G
agggcgaattgggccctctagcatgcatgctcgagcggccgccagtgtgatggatatctgcagaattcggcttgatcaatcgcaggactttaggctggtcgtgctttgttgctcttctctgtggattatcttatgctcaaaaaaaaaaaaagccgaattccagcacactggnggccgttngtaggggatccgngcngggcn

SEQ ID NO: 2088 - DNA, 156 bp, Homo Sapiens
  misc_feature 144, 147, 155, 156: n = A,T,C or G
ctctagctgcatgctcgagcggccgccagtgtgatggatatctgcagaattcggcttgatcaatcgcccacatcactcgagacgtaaattatggctgaatcatccgctaccttcacgtcaaaaaaaaaaaaaaaaaaaaaaagnccnatttccann

SEQ ID NO: 2089 - DNA, 183 bp, Homo Sapiens
  misc_feature 149, 155, 168, 177, 182, 183: n = A,T,C or G
ggcgaattgggccctctagctgcatgctcgagcggccgccagtgtgatggatatctgcagaattcggcttgatcaatcgcaattcaaaatataaatgtggcccaactgaaatcgatacagtggctcaaatttggtcaaaaaaaaaaaangccganttccagcacactngggggccgntcctnn

SEQ ID NO: 2090 - DNA, 172 bp, Homo Sapiens
  misc_feature 161, 167, 171, 172: n = A,T,C or G
agggcgaattgggccctctagctgcatgctcgagcggccgccagtgtgatggatatctgcagaattcggcttgatcaatcgcccacatcactcgagacgtaaattatggctgaatcatccgctaccttcacgtcaaaaaaaaaaaaaaaagggggcaaaangctaantttnn

SEQ ID NO: 2091 - DNA, 72 bp, Homo Sapiens
  misc_feature 67, 71, 72: n = A,T,C or G
ggcgaattgggccctctagctgcatgctcgagcggccgccagtgtgatggatatctgcagaattagnctann

SEQ ID NO: 2092 - DNA, 204 bp, Homo Sapiens
  misc_feature 139, 163, 172, 175, 188: n = A,T,C or G
ctctagctgcatgctcgagcggccgccagtgtgatggatatctgcagaattcggcttgatcaatcgcccacatcactcgagacgtaaattatggctgaatcatccgctaccttcacgtcaaaaaaaaaaaaaaaaaatnctacccggggggaattaaaaattntaagctganaangctacttaaaatnggccaaaaaaaaaaaa

SEQ ID NO: 2093 - DNA, 147 bp, Homo Sapiens
  misc_feature 140, 143, 147: n = A,T,C or G
atagggcgaattgggccctctagctgcatgctcgagcggccgccagtgtgatggatatctgcagaattcggcttgatcaatcgcatagagaagagggaggtgtcaaaaaaaaaaaaatgccaagaggtttaaaagacggnggntggn

SEQ ID NO: 2094 - DNA, 93 bp, Homo Sapiens
  misc_feature 85, 88, 93: n = A,T,C or G
gggcgaattgggccctctagcatgcatgctcgagcggccgccagtgtgatggatatctgcagaattcggcatttttttttttttnganacagn

SEQ ID NO: 2095 - DNA, 130 bp, Homo Sapiens
agggcgaattgggccctctagctgcatgctcgagcggccgccagtgtgatggatatctgcagaattcggctgccaacacagcaaaaccccgtctccatcaaaaaaaaaaaaaaaaaaaaaaaaaaaaggg

SEQ ID NO: 2096 - DNA, 185 bp, Homo Sapiens
  misc_feature 149, 156, 164, 166, 181: n = A,T,C or G
ggcgaattgggccctctagctgcatgctcgagcggccgccagtgtgatggatatctgcagaattgatcaatcgcccacatcactcgagacgtaaattatggctgaatcatccgttaccttcacgtcgaaaaaaaaaaaaaaaaaaaaangccgganttccagcncncttgggggccggttnttag

SEQ ID NO: 2097 - DNA, 161 bp, Homo Sapiens
agggcgaattgggccctctagctgcatgctcgagcggccgccagtgtgatggatatctgcagaattcggcttgatcaatcgcttgaacccggtaggcggaagttgcagtgaactgagattgcgtgtgtcaaagccgaattccagcacactggcggccgctc

SEQ ID NO: 2098 - DNA, 114 bp, Homo Sapiens
  misc_feature 74, 76, 93, 96, 104: n = A,T,C or G
tctagcatgcatgctcgagcggccgccagtgtgatggatatctgcagaattttttttttttttttttttttttngngggaaagggtttggggnttnggggaggntttaaggggc

SEQ ID NO: 2099 - DNA, 28 bp, Homo Sapiens
  misc_feature 25: n = A,T,C or G
atctgcagaatttgacttattttanttt

SEQ ID NO: 2100 - DNA, 162 bp, Homo Sapiens
  misc_feature 146, 148, 156, 158, 162: n = A,T,C or G
ctctagctgcatgctcgagcggccgccagtgtgatggatatctgcagaattcggcttgatcaatcgcttaggaagtaaagccttgtctccctccctgtcaaaaaaaaaaaaaaagccgaattccagcacactggcggccgttcgtncnggctccgngngggn

SEQ ID NO: 2101 - DNA, 128 bp, Homo Sapiens
  misc_feature 107, 119: n = A,T,C or G
ctctagcttgcatgctcgagcggccgccagtgtgatggatatctgcagaattcggcttgatcaatcgcatagagaagagggaggtgtcaaaaaaaaaaaaagccganttccagcacacntggcggccg

SEQ ID NO: 2102 - DNA, 122 bp, Homo Sapiens
  misc_feature 99, 116, 118, 122: n = A,T,C or G
gggcgaattgggccctctagatgcatgctcgagcggccgccagtgtgatggatatctgcagaattcggcttccagatctccagtaaggtccataattcnagcacactggcggccgntngtan

SEQ ID NO: 2103 - DNA, 225 bp, Homo Sapiens
  misc_feature 174, 201, 213, 219, 224, 225: n = A,T,C or G
ctctagatgcatgctcgagcggccgccagtgtgatggatatctgcagaattttttttttgagtgtgggtttagtaatggggtttgtggggttttcttctaagccttctcctatttatgggggtttagtattgattgttagcggttagatcaagccgaattccagcacactggcnggccgttactagtggatccgagctcgntaccaagcttgncgcaancatgnn

SEQ ID NO: 2104 - DNA, 170 bp, Homo Sapiens
  misc_feature 168: n = A,T,C or G
ggcgaattgggccctctagagcatgctcgagcggccgccagtgtgatggatatctgcagaattcggcttgatctaaccgggagggggggtttggtggaaattttttgttatgatgtctgtgtggaaagcggctgtgcaaagccgaattccagcacactggccggccgnta

SEQ ID NO: 2105 - DNA, 131 bp, Homo Sapiens
  misc_feature 23, 129, 131: n = A,T,C or G
agggcgaattgggccctctagcntgcatgctcgagcggccgccagtgtgatggatatctgcagaattcccatgtgccttttacccagctccggttagatcaagccgaattccagcacactggcggccgntn

SEQ ID NO: 2106 - DNA, 86 bp, Homo Sapiens
  misc_feature 77, 80, 86: n = A,T,C or G
ctctagatgcatgctcgagcggccgccagtgtgatggatatctgcagaattcggctttttttttttttgacggttanatnaagccn

SEQ ID NO: 2107 - DNA, 206 bp, Homo Sapiens
  misc_feature 86, 108, 136, 174, 180, 186, 190, 199, 203, 206: n = A,T,C or G
ctctagatgcatgctcgagcggccgccagtgtgatggatatctgcagaattcggcttgatctaaccgaataagtaaataaatgtgntctcccttaggagaaaagcagnaatttctcccttttctctgggagtcagntaaacctcattttacgtcaaaaaaaaaaaaagcccganttccancacacntggntgggccgcnggtnagn

SEQ ID NO: 2108 - DNA, 187 bp, Homo Sapiens
  misc_feature 180, 183, 187: n = A,T,C or G
atagggcgaattgggccctctagatgcatgctcgagcggccgccagtgtgatggatatctgcagaattcggcttgatctaaccgggagggggggtttggtggaaattttttgttatgatgtctgtgtggaaagcggctgtgcagacaagccgaattccagcacactggcggccgctcgtnctngctn

SEQ ID NO: 2109 - DNA, 205 bp, Homo Sapiens
  misc_feature 170, 198: n = A,T,C or G
gcgaattgggccctctagctgcatgctcgagcggccgccagtgtgatggatatctgcagaattcggcttgatctaaccggagctgggtaaaaggcacatgggatctccctctgtgctatttcttttaactgcgagtgaatctacaactgtctcaaaaaaaaaaaaagccngaattccagcacacttggcgggccgttngtagggg

SEQ ID NO: 2110 - DNA, 105 bp, Homo Sapiens
  misc_feature 88, 90, 99, 101, 105: n = A,T,C or G
ctctagcatgcatgctcgagcggccgccagtgtgatggatatctgcagaattcggctttttttttttttgacgaaaaaggaggttaancngactcccananaaan

SEQ ID NO: 2111 - DNA, 89 bp, Homo Sapiens
tttttttgaccatctcgccagacccgggccatggcttgttcatcattggctgggttccagtcagggtcaaacatgaccagccggttaga

SEQ ID NO: 2112 - DNA, 34 bp, Homo Sapiens
  misc_feature 21, 28, 31, 34: n = A,T,C or G
tttttttttttttgagccagnaaggaancanggn

SEQ ID NO: 2113 - DNA, 218 bp, Homo Sapiens
ttgatctaaccgctaacattactgcaggccacctactcatgcacctaattggaagcgccaccctagcaatatcaaccattaaccttccctctacacttatcatcttcacaattctaattctactgactatcctagaaatcgctgtcgccttaatccaagcctacgttttcacacttctagtaagcctctctctgccttcccctggtcaaaaaaaaaaa

SEQ ID NO: 2114 - DNA, 175 bp, Homo Sapiens
ttgatctaaccgggcaaaagaagtacaaggaatttcagaacactacctgagaagaaaaggaataataataaatgaaacatctgcagttgtgtatgcctcagttacctcacaggtcgtaaatatcaaataaatcaaaatggtgaagttcgtctagagaaacagtggtcaaaaaaaa

SEQ ID NO: 2115 - DNA, 176 bp, Homo Sapiens
ttgatctaaccgggcaaaagaagtacaaggaatttcagaacactacctgagaagaaaaggaataataataaatgaaacatctgcagttgtgtatgctcagttactcacaggtcgtaaatatcaaataaatcaaagtggtgaagttcgtctagagaaacagtggtcaaaaaaaaaaa

SEQ ID NO: 2116 - DNA, 43 bp, Homo Sapiens
  misc_feature 21, 26, 34, 39, 43: n = A,T,C or G
tttttttttttttgagtcagnaaggnaacatggntaagngccn

SEQ ID NO: 2117 - DNA, 184 bp, Homo Sapiens
  misc_feature 97, 99, 107, 109, 119, 161, 176, 177: n = A,T,C or G
tacagggcgatttgggccctctacagcatgctcgagcggccgccagtgtgatggatatctgcagaattcggccgaattccagcacactggcggccgntngtactggntncgagctcggnaccaagcttggcgtaatcatggtcatagctgtttcctgcatnccggccccctgcccnncccccct

SEQ ID NO: 2118 - DNA, 78 bp, Homo Sapiens
  misc_feature 76: n = A,T,C or G
agatgcatgctcgagcggccgccagtgtgatggatatctgcagaattcggccgaattccagcacactggcggccgnta

SEQ ID NO: 2119 - DNA, 176 bp, Homo Sapiens
ttgatctaaccgggcaaaagaagtacaaggaatttcagaacactacctgagaagaaaaggaataataataaatgaaacatctgcagttgtgtatgctcagttactcacaggtcgtaaatatcaaataaatcaaaatggtgaagttcgtctagagaaacagtggtcaaaaaaaaaaa

SEQ ID NO: 2120 - DNA, 183 bp, Homo Sapiens
  misc_feature 102, 105, 176, 179: n = A,T,C or G
ctatagggcgatttgggccctctacatgcatgctcgagcggccgccagtgtgatggatatctgcagaattcggccgaattccagcacactggcggccgttantantggatccgagctcggtaccaagcttggcgtaatcatggtcatagctgtttcctgcaattcctccccccctnccnttcc

SEQ ID NO: 2121 - DNA, 173 bp, Homo Sapiens
ttgatctaaccgggcaaaagaagtacaaggaatttcagaacactacctgagaagaaaaggaataataataaatgaaacatctgcagttgtgtatgctcagttactcacaggtcgtaaatatcaaataaatcaaaatggtgaagttcgtctagagaaacagtggtcaaaaaaaa

SEQ ID NO: 2122 - DNA, 42 bp, Homo Sapiens; identical to SEQ ID NO: 411
  misc_feature 25, 30, 35, 41, 42: n = A,T,C or G

SEQ ID NO: 2123 - DNA, 176 bp, Homo Sapiens; identical to SEQ ID NO: 2119

SEQ ID NO: 2124 - DNA, 166 bp, Homo Sapiens
  misc_feature 102, 103, 115, 160, 164, 166: n = A,T,C or G
tagggcgatttgggccctctacatgcatgctcgagcggccgccagtgtgatggatatctgcagaattcggccgaattccagcacactggcggccgttagtannggatccgagctnggtaccaagcttggcgtaatcatggtcatagctgtttcctgtacncctncn

SEQ ID NO: 2125 - DNA, 193 bp, Homo Sapiens
  misc_feature 122, 138, 139, 150, 171, 179, 186, 192, 193: n = A,T,C or G
ttgatctaaccgggcaaaagaagtacaaggaatttcagaacactacctgagaagaaaaggaataataataaatgaaacatctgcagttgtgtatgctcagttactcacaggtcgtaaatatnaaataaatcaaaatgnngaagttcgtcnagagaaacagggggtcaaaanaacaaaanagcctgnttttcnn

SEQ ID NO: 2126 - DNA, 176 bp, Homo Sapiens; identical to SEQ ID NO: 2119

SEQ ID NO: 2127 - DNA, 155 bp, Homo Sapiens
ttgatctaaccgggcaaaagaagtacaaggaatttcagaacactacctgagaagaaaaggaataataataaatgaaacatctgcagttgtgtatgctcagttactcacaggtcgtaaatatcaaataaatcaaaatggtgaagttcgtctagaga

SEQ ID NO: 2128 - DNA, 106 bp, Homo Sapiens
  misc_feature 8, 89, 91, 100, 104, 106: n = A,T,C or G
cgaatttnggccctctaaatgcatgctcgagcggccgccagtgtgatggatatttgcagaattagccgaattccagcacactggcggcngntagtaccangatncn

SEQ ID NO: 2129 - DNA, 94 bp, Homo Sapiens
  misc_feature 17: n = A,T,C or G
cgatttgggccctctanctgcatgctcgagcggccgccagtgtgatggatatctgcaagccgaattccagcacactggcggccgctcgtgcatg

SEQ ID NO: 2130 - DNA, 120 bp, Homo Sapiens
  misc_feature 21: n = A,T,C or G
ggcgaattgggccctctagcntgcatgctcgagcggccgccagtgtgatggatatctgcagaattcggcttgtttagttctgtgtataaatgaagccgaattccagcacactggcggccg

SEQ ID NO: 2131 - DNA, 214 bp, Homo Sapiens
  misc_feature 197, 203, 212, 213, 214: n = A,T,C or G
ttgatctaaccgggcaaaagaagtacaaggaatttcagaacactacctgagaagaaaaggaataataataaatgaaacatctgcagttgtgtatgctcagttactcacaggtcgtaaatatcaaataaatcaaaatggtgaagttcgtctagagaaacagtggtcaaaaaaaaaaaagcccgaatttccaccccctnggcggnccggttttnnn

SEQ ID NO: 2132 - DNA, 113 bp, Homo Sapiens
  misc_feature 3, 9, 15, 27, 28, 109, 110: n = A,T,C or G
ccnctacanggcgtnttgggccctctnnatgcatgctcgagcggccgccagtgtgatggatatctgcagaattcggccgaattccagcacactggcggccgctcgtacnngct

SEQ ID NO: 2133 - DNA, 40 bp, Homo Sapiens
ttactaaacagacaagcacagagtcactattgcggttaga

SEQ ID NO: 2134 - DNA, 176 bp, Homo Sapiens
ttgatctaaccgggcaaaagaagtacaaggactttcagaacactacctgagaagaaaaggaataataataaatgaaacatctgcagttgtgtatgctcagttactcacaggtcgtaaatatcaaataaatcaaaatggtgaagttcgtctagagaaacagtggtcaaaaaaaaaaa

SEQ ID NO: 2135 - DNA, 144 bp, Homo Sapiens
  misc_feature 91, 93, 101, 126: n = A,T,C or G
cgaattgggccctctagctgcatgctcgagcggccgccagtgtgatggatatctgcagaattcggccgaattccagcacactggcggccgntngtacaggntccgagctgggaccaagccttggangcagcatggcgatagatg

SEQ ID NO: 2136 - DNA, 28 bp, Homo Sapiens
ttagcacagagtcactattgcggttaga

SEQ ID NO: 2137 - DNA, 98 bp, Homo Sapiens
  misc_feature 2, 96, 98: n = A,T,C or G
gngacgatttgggccctctaacatgcatgctcgagcggccgccagtgtgatggatatctgcagaattcggccgaattccagcacactggcggccgntn

SEQ ID NO: 2138 - DNA, 25 bp, Homo Sapiens
ttgatctaaccgtcaaaaaaaaaaa

SEQ ID NO: 2139 - DNA, 121 bp, Homo Sapiens
  misc_feature 7, 13, 26, 102, 114, 120, 121: n = A,T,C or G
cctacanggcgtntgggccctctacngcatgctcgagcggccgccagtgtgatggatatctgcagaattcggctagccgaattccagcacactggcggccgntcgtactggctncgagcnn

SEQ ID NO: 2140 - DNA, 27 bp, Homo Sapiens
tctttacacttttcctacggttagatc

SEQ ID NO: 2141 - DNA, 118 bp, Homo Sapiens
  misc_feature 1, 101, 109, 117, 118: n = A,T,C or G
ntacagggcgatttgggccctctacatgcatgctcgagcggccgccagtgtgatggatatctgcagaattcggccgaattccagcacactggcggccgctngtactggntccgagcnn

SEQ ID NO: 2142 - DNA, 91 bp, Homo Sapiens
ttgatctaaccggggaaccaagactgtgcaggagaaagagaactagtgctgagggcctcaataaagtttgtgtttatgtcaaaaaaaaaaa

SEQ ID NO: 2143 - DNA, 100 bp, Homo Sapiens
  misc_feature 2, 9, 18, 69, 92, 96, 100: n = A,T,C or G
antttggcngctctaacngcatgctcgagcggccgccagtgtgatggatatctgcagaattcggccganttccagcacactggcggccgctngtantggn

SEQ ID NO: 2144 - DNA, 25 bp, Homo Sapiens
ttgatctaaccgtcaaaaaaaaaaa

SEQ ID NO: 2145 - DNA, 23 bp, Homo Sapiens
ttgatctaaccgtcaaaaaaaac

SEQ ID NO: 2146 - DNA, 43 bp, Homo Sapiens
  misc_feature 34, 38, 43: n = A,T,C or G
tttttttttttttgacgaaaaaggaggttaaacngacncccan

SEQ ID NO: 2147 - DNA, 38 bp, Homo Sapiens
  misc_feature 34, 36, 38: n = A,T,C or G
tttttttttttttgacgaaaaaggaggttaaacngncn

SEQ ID NO: 2148 - DNA, 49 bp, Homo Sapiens
  misc_feature 30, 34, 43, 45, 49: n = A,T,C or G
tttttttttttttgacgaaaaaggaggttnaacngactcccananaaan

SEQ ID NO: 2149 - DNA, 49 bp, Homo Sapiens
  misc_feature 23, 30, 34, 43, 45, 49: n = A,T,C or G
tttttttttttttgacgaaaaangaggttnaacngactcccananaaan

SEQ ID NO: 2150 - DNA, 40 bp, Homo Sapiens
  misc_feature 15, 17, 27, 36, 38, 40: n = A,T,C or G
ttttttttttttttngncgaaaaaggnggttaaacngncn

SEQ ID NO: 2151 - DNA, 54 bp, Homo Sapiens
  misc_feature 34, 38, 45, 49, 54: n = A,T,C or G
tttttttttttttgacgaaaaaggaggttaaacngacncccaganaaangggan

SEQ ID NO: 2152 - DNA, 95 bp, Homo Sapiens
ttttttttcttttgaccatctcgccagacccgggccatggcttgttcatcattggctgggttccagtcagggtcaaacatgaccagccggttaga

SEQ ID NO: 2153 - DNA, 34 bp, Homo Sapiens
  misc_feature 21, 26, 31, 34: n = A,T,C or G
tttttttttttttgagccagnaaggnaacanggn

SEQ ID NO: 2154 - DNA, 76 bp, Homo Sapiens
  misc_feature 2, 4, 15, 18, 36, 41, 53, 54, 63, 69, 73, 76: n = A,T,C or G
antnttttttttttnganccagcaagcaaccagggntaacnccctgaaaactnngccaacagnctgcgnttanatn

SEQ ID NO: 2155 - DNA, 247 bp, Homo Sapiens
ttggaaccaatccagtcaggacgtcactgactctaaatcaggtgactcaagatgcccaaaaatgatggatagagaaacagaaatctctgaatgtcagaaccctgtcttttaaaaaggcagtcactgccttcaggtgatgctgccccagaaacttaaaatttagtcgaggcagtttcaattgttactgtggaccgaattaggatcacaataaacgataatgcaggttcttcaatggcaaaaaaaaaaa

SEQ ID NO: 2156 - DNA, 206 bp, Homo Sapiens
tttttttgcagagatgaggtctcactacgttgccaaggctggtctcaaactcctgggctcaagagatcttcccaccttggcctcccaaagtgctgggattacagatgtgagctaccatgacagtccctggtttttgagcacctttcatgctctttcatatttgatcttctgaaacttccttgggattggttcctccttgggattgg

SEQ ID NO: 2157 - DNA, 215 bp, Homo Sapiens
  misc_feature 208, 214: n = A,T,C or G
ttggaaccaatctccctagtatactgaggaaagactctatagtcttcatagataggattatttgatattgtaaagatgtcagttctcttcaaactgatatacagatttaatgccatcccaatcaaaatttcaataaggcttttgggaagcccaagctgattttaaaaggtatatgaaagtgtcaatggcaaaaaaaaaaaaagccganttccanc

SEQ ID NO: 2158 - DNA, 192 bp, Homo Sapiens
ttggaaccaatcccaaggaagtttcagaagatcaaatatgaaagagcatgaaaggtgctcaaaaaccagggactgtcatggtagctcacatctgtaatcccagcactttgggaggccaaggtgggaagatctcttgagcccaggagtttgagaccagccttggcaacgtagtgagacctcatctctgcaaaa

SEQ ID NO: 2159 - DNA, 142 bp, Homo Sapiens
ttcccaaaagccttattgaaattttgattgggatggcattaaatctgtatatcagtttgaagagaactgacatctttacaatatcaaataatcctatctatgaagactatagagtctttcctcggtatactagggagattgg

SEQ ID NO: 2160 - DNA, 181 bp, Homo Sapiens
ttgagatgaggtctcactacgttgccaaggctggtctcaaactcctgggctcaagagatcttcccaccttggcctcccaaagtgctgggattacagatgtgagctaccatgacagtccctggtttttgagcacctttcatgctctttcatatttgatcttctgaaacttccttgggattgg

SEQ ID NO: 2161 - DNA, 199 bp, Homo Sapiens
ttggaaccaatcccaaggaagtttcagaagatcaaatatgaaagagcatgaaaggtgctcaaaaaccagggactgtcatggtagctcacatctgtaatcccagcactttgggaggccaaggtgggaagatctcttgagcccaggagtttgagaccagccttggcaacgtagtgagacctcatctctgcaaaaaaaaaaa

SEQ ID NO: 2162 - DNA, 68 bp, Homo Sapiens
ttggaaccaatccagaaagctgttctcatcttcttaggcagtgtggcaaaaaaaaaaaaaaaaaaaac

SEQ ID NO: 2163 - DNA, 51 bp, Homo Sapiens
ttggaaccaatccgtaatctaaatggacattcaattgggcaaaaaaaaaaa

SEQ ID NO: 2164 - DNA, 51 bp, Homo Sapiens; identical to SEQ ID NO: 2163

SEQ ID NO: 2165 - DNA, 51 bp, Homo Sapiens; identical to SEQ ID NO: 2163

SEQ ID NO: 2166 - DNA, 42 bp, Homo Sapiens
ttgatctgactgccaaataaatcatcctcatggcaaaaaaaa

SEQ ID NO: 2167 - DNA, 145 bp, Homo Sapiens
  misc_feature 82, 87, 93, 116, 126, 139, 143, 145: n = A,T,C or G
ttgatctgactgctagatggggaataagggcaggtagaccagctagtaacagttgtagtagtgtgggcaaaaaaaaaaaaanccganttccancccactgggcggccgttcgtgcnggctccgggngggcccccaaccnccgntn

SEQ ID NO: 2168 - DNA, 62 bp, Homo Sapiens
ttgatctgactgctagatggggaataagggcaggtagaccagcctagtaacagttgtagtag

SEQ ID NO: 2169 - DNA, 82 bp, Homo Sapiens
ttgatctgactgacgaagaatggatcaagatcgaggtgcagctcaaggatctgatcttggctgactacggcaaaaaaaaaaa

SEQ ID NO: 2170 - DNA, 145 bp, Homo Sapiens
  misc_feature 90, 98, 105, 115, 123, 125, 136, 138, 145: n = A,T,C or G
ttgatctgactgacgaagaatggatcaaggtcgaggcgcagctcaaggatctgatcttggctgactacggcaaaaaaaaaaaaagccganttccagcncattggnggccgctcgngctggctncnggggggccccnancgccctn

SEQ ID NO: 2171 - DNA, 86 bp, Homo Sapiens
ttgatctgactggtctcagagtctacttgatagaaggactgtttgagaaatgttagaaagcagcagcaattataaggcaaaaaaaa

SEQ ID NO: 2172 - DNA, 90 bp, Homo Sapiens
  misc_feature 85, 88, 90: n = A,T,C or G
ttgatctgactgacgaagaatggatcaaggtcgaggtgcagctcaaggatctgatcttggctgactacggcaaaaaaaaaaaaanccnan

SEQ ID NO: 2173 - DNA, 41 bp, Homo Sapiens
  misc_feature 21, 29, 35, 40, 41: n = A,T,C or G
tttttttttttttgccaattngacctttntgcagnatttnn

SEQ ID NO: 2174 - DNA, 61 bp, Homo Sapiens
ttgatctgactggggactgctgagccagggcctgggctttactcaattgcaaaaaaaaaaa

SEQ ID NO: 2175 - DNA, 59 bp, Homo Sapiens
  misc_feature 23, 45, 53, 56, 59: n = A,T,C or G
tttttttttttttgcaacagggncttgctttgctgcctatgacanagggcagncanatn

SEQ ID NO: 2176 - DNA, 117 bp, Homo Sapiens
  misc_feature 63, 66, 75, 76, 89, 96, 113, 115, 117: n = A,T,C or G
ttgatctgactgagcagaacaaatcgaattccagcacactggcggccgctcgtgcatgcttcnagngggcccccnncgccctatagagngtcgtcntacatgtctctggccgncngn

SEQ ID NO: 2177 - DNA, 76 bp, Homo Sapiens
ttgatctgactgctagatggggaataagggcaggtagaccagctagtaacagttgtagtagtgtgggcaaaaaaaa

SEQ ID NO: 2178 - DNA, 79 bp, Homo Sapiens
ttgatctgactgctagatggggaataagggcaggtagaccagctagtaacagttgtagtagtgtgggcaaaaaaaaaaa

SEQ ID NO: 2179 - DNA, 84 bp, Homo Sapiens
  misc_feature 80: n = A,T,C or G
ttgatctgactgctatggttatccaagaaggcaccccagaatacctgttggccacccgctgtttggtatatgcaaaaaantaaa

SEQ ID NO: 2180 - DNA, 46 bp, Homo Sapiens
ttggaaccaatcctatgcatggtttcagcactagccaaaaaaaaaa

SEQ ID NO: 2181 - DNA, 92 bp, Homo Sapiens
ttggaaccaatccaactatccatcaactgacatggataaataaaaggtgatatatacacacaaatggaatactatttggccaaaaaaaaaaa

SEQ ID NO: 2182 - DNA, 88 bp, Homo Sapiens
  misc_feature 81: n = A,T,C or G
ttggaaccaatcagtaattttaaggttttgtttgttctaaatgtaagagttcagactcacattctattaaaatttagcccnaaaaaaa

SEQ ID NO: 2183 - DNA, 92 bp, Homo Sapiens
ttggaaccaatcagtaattttaaggttttgtttgttctaaatgtaagagttcagactcacattctattaaaatttagccccaaaaaaaaaaa

SEQ ID NO: 2184 - DNA, 78 bp, Homo Sapiens
ttggaaccaatcagtaattttaaggttttgtttgttctaaatgtaagagttcagactcacattctattaaaatttagc

SEQ ID NO: 2185 - DNA, 96 bp, Homo Sapiens
ttggaaccaatcccccaaggacacccaaggataagggacaactgtatttgaatctagatcattgctctatcttctaccgacatgtgccaaaaaaaa

SEQ ID NO: 2186 - DNA, 256 bp, Homo Sapiens
  misc_feature 49, 253, 255, 256: n = A,T,C or G
ttgatctgactgctgtggaaggatgaaccagacacggattgaggcgggnagggtctgtcgtggtcacgttgatttggaaggaggagacaccggattgaggcggggagggtctgtccgtggtcatgttgatttggaaggaggtgaggaggcactcaggtagagatgcctgttgtgcatttggggctggagacacagatccagtggctccagacatggatgagatgcccaaaaaaaaattttttttttttgggcngnn

SEQ ID NO: 2187 - DNA, 241 bp, Homo Sapiens
  misc_feature 49, 91: n = A,T,C or G
ttgatctgactgctgtggaaggatgaaccagacacggattgaggcgggnagggtctgtcgtggtcacgttgatttggaaggaggagacacnggattgaggcggggagggtctgtcgtggtcatgttgatttggaaggaggtgaggaggcactcaggtagagatgcctgttgtgcatttggggctggagacacagatccagtggctccagacatggatgagatgcccaaaaaaaaatttttt

SEQ ID NO: 2188 - DNA, 28 bp, Homo Sapiens
  misc_feature 25, 27, 28: n = A,T,C or G
aattccagcacactggcggccgctngnn

SEQ ID NO: 2189 - DNA, 31 bp, Homo Sapiens
  misc_feature 27, 28, 31: n = A,T,C or G
aattccagcacactggcggccgctcgnncan

SEQ ID NO: 2190 - DNA, 157 bp, Homo Sapiens
tttgggagacacaattcagcacactgcaggaagcaacacaggcagggtgagcgtctaacaaagccctgagctcggcagcagatggaggcttcaggaaggaaggaagccagtgtgtctggagcccagtgaggaaaggggaaagtgggtggcagtcaga

SEQ ID NO: 2191 - DNA, 201 bp, Homo Sapiens
ttgatctgactggactgattgctgaagagaagggcctggtggtagacatggatggctttgaagaggagaggaaactggcccagctgaaatcacagggcaagggagctggtggggaagacctcattatgctggacatttacgctatcgaagagctccgggcacggggtctggaggtcacagatgattccccaaaaaaaaaaa

SEQ ID NO: 2192 - DNA, 62 bp, Homo Sapiens
  misc_feature 32, 40, 42, 58, 61, 62: n = A,T,C or G
ttatctgactgccaaaaaaaaaaaaagccganttccagcncncttggcggccgctcgngcnn

SEQ ID NO: 2193 - DNA, 43 bp, Homo Sapiens
ttgatctgactgccctgtcccctcctaccccagtccccaaaaa

SEQ ID NO: 2194 - DNA, 45 bp, Homo Sapiens
ttgatctgactgccaaataaatcatcctcatgccaaaaaaaaaaa

SEQ ID NO: 2195 - DNA, 47 bp, Homo Sapiens
ttgatctgactgccaaataaatcatcctcatgccaaaaaaaaaaaaa

SEQ ID NO: 2196 - DNA, 27 bp, Homo Sapiens
  misc_feature 21, 25, 27: n = A,T,C or G
aattccagcacactggcggcngctngn

SEQ ID NO: 2197 - DNA, 35 bp, Homo Sapiens
  misc_feature 26, 30, 35: n = A,T,C or G
tttttttttttttggcgcggggaganattnaattn

SEQ ID NO: 2198 - DNA, 24 bp, Homo Sapiens
ttcccagcaacctttgcagtcaga

SEQ ID NO: 2199 - DNA, 224 bp, Homo Sapiens
  misc_feature 91: n = A,T,C or G
ttgatctgactgctgtggaaggatgaaccagacacggattgaggcgggaagggtctgtcgtggtcacgttgattgggaaggaggagacacnggattgaggcggggagggtctgtcgtggtcatgttgatttggaaggaggtgaggaggcactcaggtagagatgcctgttgtgcatttggggctggagacacagatccagtggctccagacatggatgagatgc

SEQ ID NO: 2200 - DNA, 66 bp, Homo Sapiens
ttgatctgactggaccccaagtggctgctatgtaaattaaatctctccccgcgccaaaaaaaaaaa

SEQ ID NO: 2201 - DNA, 67 bp, Homo Sapiens
ttgatctgactggaccccaagtggctgctatgtaaattaaatctctccccgcgccaaaaaaaaaaaa

SEQ ID NO: 2202 - DNA, 225 bp, Homo Sapiens
ttgatctgactgctgtggaaggatgaaccagacacggattgaggcgggaagggtctgtcgtggtcaccgttgattgggaaggaggagacaccggattgaggcggggagggtctgtcgtggtcatgttgatttggaaggaggtgaggaggcactcaggtagagatgcctgttgtgcatttggggctggagacacagatccagtggctccagacatggatgagatgc

SEQ ID NO: 2203 - DNA, 214 bp, Homo Sapiens
  misc_feature 123, 190: n = A,T,C or G
atctcatccatgtctggagccactggatctgtgtctccagccccaaatgcacaacaggcatctctacctgagtgcctcctcacctccttccaaatcaacatgaccacgacagaccctccccgngtcaatccgtgtctcctccttccaaatcaacgtgaccacgacagacccttcccgcctcaatccgtgnctggttcatccttccacagcagtc

SEQ ID NO: 2204 - DNA, 60 bp, Homo Sapiens
ttgatctgactggaccccaagtggctgctatgtaaattaaatctctccccgcgccaaaaa

SEQ ID NO: 2205 - DNA, 49 bp, Homo Sapiens; identical to SEQ ID NO: 712
  misc_feature 27, 34, 47, 48, 49: n = A,T,C or G

SEQ ID NO: 2206 - DNA, 89 bp, Homo Sapiens
  misc_feature 27, 48, 49, 61, 70: n = A,T,C or G
aattccagcacactggcggccgctcgngcatgcatctagagggcccanntcgccctatagngagtcgtantacaatgtcactggccgtc

SEQ ID NO: 2207 - DNA, 49 bp, Homo Sapiens; identical to SEQ ID NO: 712
  misc_feature 27, 34, 47, 48, 49: n = A,T,C or G

SEQ ID NO: 2208 - DNA, 63 bp, Homo Sapiens
ttgatctgactggaccccaagtggctgctatgtaaattaaatctctccccgcgccaaaaaaaa

SEQ ID NO: 2209 - DNA, 31 bp, Homo Sapiens; identical to SEQ ID NO: 2001
  misc_feature 25, 28, 31: n = A,T,C or G

SEQ ID NO: 2210 - DNA, 40 bp, Homo Sapiens
  misc_feature 35, 37, 40: n = A,T,C or G
tttttttttttttttttttttttgggggaaggttngnttn

SEQ ID NO: 2211 - DNA, 87 bp, Homo Sapiens
  misc_feature 18, 27, 36, 52, 56, 64, 71, 79, 86, 87: n = A,T,C or G
tttttttttttttggcgnaggtttggnctagggggnaccctgaaaatagggnaaancagggaangaacccncctatganggcaaann

SEQ ID NO: 2212 - DNA, 52 bp, Homo Sapiens
  misc_feature 29, 50, 51, 52: n = A,T,C or G
ttaattccagcacactggcggccgctcgngcatgcatctagagggcccannn

SEQ ID NO: 2213 - DNA, 156 bp, Homo Sapiens
tttacaacgaggcaaaggctgtgttctagatcctcagaaaggaaccaccgtggggaggtccttttctctcagctggcggagccacccagatgtgaccgaaccgatgcgatttaggagtgccaccacgtctggagcaccgggagtggaaaaggcaag

SEQ ID NO: 2214 - DNA, 181 bp, Homo Sapiens
tttacaacgaggcaaaggctgtgttctagatcctcagaaaggaaccaccgtggggaggtccttttctctcagctggcggagccacccagatgtgaccgaaccgatgcgatttaggagtgccaccacgtctggagcaccgggagtggaaaaggcaagaaatattgttcgccaaaaaaaaaaa

SEQ ID NO: 2215 - DNA, 248 bp, Homo Sapiens
  misc_feature 191, 211, 222, 235, 247, 248: n = A,T,C or G
ttccaggaaatctctattaagaaggctttgggatcaccattttcacctatcctatattgaaaagaaactggacttaattcccggaaactttcatctccttcataaatagagcgtaatgcttctagttccatctcctggtcctcgttgtaaagccgaattccagcacactgggcggccgctcgtgctggctncgagcgggcccccaacgccngcgtgagcgtngtcatacctgtcntccggccgcggnn

SEQ ID NO: 2216 - DNA, 238 bp, Homo Sapiens
  misc_feature 136, 139, 149, 151, 193, 201, 206, 229, 232, 238: n = A,T,C or G
tttacaacgaggcaaaggctgtgttctagatcctcagaaaggaaccaccgtggggaggtccttttctctcagctggcggagccacccagatgtgaccgaaccgatgcgattttttttttttttggggatatgtttntgnccaggaaatntntattaaaaaggctttgggatcaccattttcacctatcctatnttgaaaanaaacnggacttaattcccggaaactttnatntccttn

SEQ ID NO: 2217 - DNA, 176 bp, Homo Sapiens
tacaacgaggcaaaggctgtgttctagatcctcagaaaggaaccaccgtggggaggtccttttctctcagctggcggagccacccagatgtgaccgaaccgatgcgatttaggagtgccaccacgtctggagcaccgggagtggaaaaggcaagaaatattgttcgccaaaaaaaa

SEQ ID NO: 2218 - DNA, 156 bp, Homo Sapiens; identical to SEQ ID NO: 2213

SEQ ID NO: 2219 - DNA, 201 bp, Homo Sapiens
ttcttgccttttccactcccggtgctccagacgtggtggcactcctaaatcgcatcggttcggtcacatctgggtggctccgccagctgagagaaaaggacccccccacggtggttcctttctgaggatctagaacacagcctttgcctcgttgtaccccacggtggttcctttctgaggatctagaacacagcctttgcc

SEQ ID NO: 2220 - DNA, 181 bp, Homo Sapiens; identical to SEQ ID NO: 2214

SEQ ID NO: 2221 - DNA, 153 bp, Homo Sapiens
tttcttgccttttccactcccggtgctccagacgtggtggcactcctaaatcgcatcggttcggtcacatctgggtggctccgccagctgagagaaaaggacctccccacggtggttcctttctgaggatctagaacacagcctttgcctcgt

SEQ ID NO: 2222 - DNA, 181 bp, Homo Sapiens; identical to SEQ ID NO: 2214

SEQ ID NO: 2223 - DNA, 156 bp, Homo Sapiens; identical to SEQ ID NO: 2213

SEQ ID NO: 2224 - DNA, 269 bp, Homo Sapiens
  misc_feature 223, 227, 252, 260, 267: n = A,T,C or G
tttacaacgaggcaaaggctgtgttctagatcctcagaaaggaaccaccgtggggaggtccttttctctcagctggcggagccacccagatgtgaccgaaccgatgcgatttaggagtgccaccacgtctggagcaccgggagtggaaaaggcaagaaatattgttcgccaaaaaaaaaaaaaatcgcatcggttcggtcacttacaacgaggcaaaggctgngttntaaatcctcaaaaaggaaccaccgnggggaggnccttttntt

SEQ ID NO: 2225 - DNA, 202 bp, Homo Sapiens
  misc_feature 194, 200: n = A,T,C or G
tttacaacgagggatgctctactaccagacagagaaatatgatttggctatcaaagaccttaaagaagccttgattcagcttcgagggaaccagctgatagactataagatcctggggctccagttcaagctgtttgcctgtgaggtgttatataacattgctttcatgtatgccaaaaaaaaaaaaagccganttccancc

SEQ ID NO: 2226 - DNA, 183 bp, Homo Sapiens
tttacaacgagggatgctctactaccagacagagaaatatgatttggctatcaaagaccttaaagaagccttgattcagcttcgagggaaccagctgatagactataagatcctggggctccagttcaagctgtttgcctgtgaggtgttatataacattgctttcatgtatgccaaaaaaaa

SEQ ID NO: 2227 - DNA, 186 bp, Homo Sapiens
  misc_feature 167, 183, 185, 186: n = A,T,C or G
tttacaacgagggatgctctactaccagacagagaaatatgatttggctatcaaagaccttaaagaagccttgattcagcttcgagggaaccagctgatagactataagatcctggggctccagttcaagctgtttgcctgtgaggtagtagagcatccctcgctgnaaagccgcattccgcngnn

SEQ ID NO: 2228 - DNA, 186 bp, Homo Sapiens
tttacaacgagggatgctctactaccagacagagaaatatgatttggctatcaaagaccttaaagaagccttgattcagcttcgagggaaccagctgatagactataagatcctggggctccagttcaagctgtttgcctgtgaggtgttatataacattgctttcatgtatgccaaaaaaaaaaa

SEQ ID NO: 2229 - DNA, 174 bp, Homo Sapiens
tttttggcatacatgaaagcaatgttatataacacctcacaggcaaacagcttgaactggagccccaggatcttatagtctatcagctggttccctcgaagctgaatcaaggcttctttaaggtctttgatagccaaatcatatttctctgtctggtagtagagcatccctcgt

SEQ ID NO: 2230 - DNA, 186 bp, Homo Sapiens; identical to SEQ ID NO: 2228

SEQ ID NO: 2231 - DNA, 161 bp, Homo Sapiens
  misc_feature 103, 124, 125, 142, 147, 155, 159: n = A,T,C or G
ttatctctattaagaaggctttgggatcaccattttcacctatctcctggtcctcgttgtaaagccgaattccagcacacttggcggccgctcgtgctggctncgagcgggcccccaacgcccnntagagcgtcgtcatacntgtcnctggccgncggntc

SEQ ID NO: 2232 - DNA, 76 bp, Homo Sapiens
ttatatgtttctgtccaggaaatctctattaagaaggctttgggatcaccattttcacctatctcctggtcctcgt

SEQ ID NO: 2233 - DNA, 202 bp, Homo Sapiens
  misc_feature 128, 149, 152, 167, 173, 184, 188, 195, 198: n = A,T,C or G
ttttggtgatatgtttctgtccaggaaatctctattaagaaggctttgggatcaccattttcacctatctcctggtcctcgttgtaaagccgaattccagcacacttggcggccgctcgtgctggctncgagcgggcccccaacgcccnatngagcgtcgtcatacnctgtcnctggacgcggntttncaccccnccncccc

SEQ ID NO: 2234 - DNA, 60 bp, Homo Sapiens
  misc_feature 29, 38, 41, 56, 59: n = A,T,C or G
tttttttttttttggggatatgcttctgnccaggaaanctntattaaaaaggcttnggna

SEQ ID NO: 2235 - DNA, 75 bp, Homo Sapiens
tttacaacgaggaccaggaaatctctattaagaaggctttgggatcaccattttcacctatctcctggtcctcgt

SEQ ID NO: 2236 - DNA, 136 bp, Homo Sapiens
  misc_feature 71, 92, 93, 106, 110, 118, 129, 136: n = A,T,C or G
tttacaacgaggaccaggagataggtgaaaatggcgaattccagcacactggcggccgctcgtgctggctncgagcgggcccccaacgcccnntagagcgtcgtcntacntgtctccngtgccgtcggntttacan

SEQ ID NO: 2237 - DNA, 110 bp, Homo Sapiens
  misc_feature 103: n = A,T,C or G
tttacaacgaggaccaggagataggtgaaaatggtgatctcaaagccttcttaatagagatttcctggacagaaacatatccccaaaaaaaaaaaaagccganttccaga

SEQ ID NO: 2238 - DNA, 149 bp, Homo Sapiens
  misc_feature 102, 132: n = A,T,C or G
ttacaacgaggaccaggagataggtgaaaatggtgatcccaaagccttcttaatagagatttcctggacagaaacatatccccaaaaaaaaaaaaagccganttccagcccacttggcgggccgttcgtgcnggctccgggggggcccc

SEQ ID NO: 2239 - DNA, 21 bp, Homo Sapiens
ttagtggtctccgcccctcgt

SEQ ID NO: 2240 - DNA, 21 bp, Homo Sapiens
ttagtggtctccgcccctcgt

SEQ ID NO: 2241 - DNA, 86 bp, Homo Sapiens
ttacaacgagaggcggagaccacttgggaccaaagcgaggacatgaaatgggagagcgcagtggatgacatgaccaaaaaaaaaaa

SEQ ID NO: 2242 - DNA, 21 bp, Homo Sapiens
ttagtggtctccgcccctcgt

SEQ ID NO: 2243 - DNA, 55 bp, Homo Sapiens
  misc_feature 37, 40, 49, 50: n = A,T,C or G
aattccagcacactggcggccgctcgtgcatgcttcnagngggcccccnncgtcc

SEQ ID NO: 2244 - DNA, 37 bp, Homo Sapiens
  misc_feature 30, 31: n = A,T,C or G
aattccagcacactggcggccgctcgtgcnngcttca

SEQ ID NO: 2245 - DNA, 19 bp, Homo Sapiens
  misc_feature 16: n = A,T,C or G
agcacactggcaggcngct

SEQ ID NO: 2246 - DNA, 45 bp, Homo Sapiens
  misc_feature 37, 42: n = A,T,C or G
aattccagcacactggcggccgctcgtgcatgcttcnagcgngcc

SEQ ID NO: 2247 - DNA, 85 bp, Homo Sapiens
tacaacgaggggcggagaccacttgggaccaaagcgaggacatggaatgggagagcgcagtggatgacatgaccaaaaaaaaaaa

SEQ ID NO: 2248 - DNA, 39 bp, Homo Sapiens
ttctttctaccccaaaaactttctaccccaaaaaaaaaa

SEQ ID NO: 2249 - DNA, 55 bp, Homo Sapiens
ctttttctttctccttatgcctctaatactttcctttctaccccaaaaaaaaaaa

SEQ ID NO: 2250 - DNA, 47 bp, Homo Sapiens
ttctttctaccccacaagatgacctctttctaccccaaaaaaaaaaa

SEQ ID NO: 2251 - DNA, 87 bp, Homo Sapiens
ttctttctacccccacaccaaaataacctctttctaccccaaaaaaaaaaaagtattgtccatgtcccaggacatcaaaaaaaatct

SEQ ID NO: 2252 - DNA, 168 bp, Homo Sapiens
  misc_feature 16, 24, 32, 38, 58, 76, 88, 97, 107, 112, 163: n = A,T,C or G
tttttttttttggggnaaaaaganagttgggngtgttnatttgcttaaagaaaacacntggaaggacacaacccanaaagtttacaanggcaatctntgggaagggnagganattcttttttttttttttttttttttttttttttttttttttttttttttnggggg

SEQ ID NO: 2253 - DNA, 21 bp, Homo Sapiens
ttctttctaccccaaaaaaaa

SEQ ID NO: 2254 - DNA, 55 bp, Homo Sapiens; identical to SEQ ID NO: 2249

SEQ ID NO: 2255 - DNA, 24 bp, Homo Sapiens
ttctttctaccccaaaaaaaaaaa

SEQ ID NO: 2256 - DNA, 30 bp, Homo Sapiens
  misc_feature 26, 27: n = A,T,C or G
ttctttctaccccaaaaaaaaaaaannccc

SEQ ID NO: 2257 - DNA, 24 bp, Homo Sapiens
  misc_feature 3, 7: n = A,T,C or G
ttntttntaccccaaaaaaaaaaa

SEQ ID NO: 2258 - DNA, 28 bp, Homo Sapiens
  misc_feature 7, 15, 23, 26, 28: n = A,T,C or G
ttttttntactcccnacactcanaanan

SEQ ID NO: 2259 - DNA, 42 bp, Homo Sapiens
  misc_feature 3, 7, 14, 21, 39: n = A,T,C or G
ttntttntaccccnacaccanaagaacctctttctaccnaag

SEQ ID NO: 2260 - DNA, 46 bp, Homo Sapiens
  misc_feature 15, 25, 33, 45: n = A,T,C or G
tttttttttttgatnaaacagggcnatggactngtcctaaaaatnc

SEQ ID NO: 2261 - DNA, 30 bp, Homo Sapiens
  misc_feature 23, 26: n = A,T,C or G
tttttttttttttggggaaaaancanagaa

SEQ ID NO: 2262 - DNA, 16 bp, Homo Sapiens
  misc_feature 11, 12, 16: n = A,T,C or G
ttttttttacnncaan

SEQ ID NO: 2263 - DNA, 127 bp, Homo Sapiens
tttacaacgagggagtactacagccctaccagaaaggctaatatttatttacttatttagagacaaggtctcggccctgtcacccagggtggatggagtacagagcgagattccgtctcaaaaaaaa

SEQ ID NO: 2264 - DNA, 127 bp, Homo Sapiens; identical to SEQ ID NO: 1066

SEQ ID NO: 2265 - DNA, 130 bp, Homo Sapiens
tttacaacgagggagtactacagccctaccagaaaggctaatatttatttacttatttagagacaaggtcttggccctgtcacccagggtggatggagtacagagcgagattccgtctcaaaaaaaaaaa

SEQ ID NO: 2266 - DNA, 125 bp, Homo Sapiens
tttacaacgagggagtactacagccctaccagaaaggctaatatttatttacttatttagagacaaggtcttggccctgtcacccagggtggatggagtacagagcgagattccgtctcaaaaaa

SEQ ID NO: 2267 - DNA, 146 bp, Homo Sapiens
  misc_feature 141, 144, 146: n = A,T,C or G
tttacaacgaggaccggcagtgggacgaccggggcaccgggcatgtgtcgtctggctacgtggagcggctgaagggcatgtccctgcttgtcagggctgagagcgacggttctctacttttagagtcaaaaaaaaaaaaanccnan

SEQ ID NO: 2268 - DNA, 127 bp, Homo Sapiens; identical to SEQ ID NO: 1066

SEQ ID NO: 2269 - DNA, 130 bp, Homo Sapiens; identical to SEQ ID NO: 2265

SEQ ID NO: 2270 - DNA, 130 bp, Homo Sapiens; identical to SEQ ID NO: 2265
